(19) United States
(12) Patent Application Publication
(10) Pub. No.: US 2021/0269787 A1
(43) Pub. Date: Sep. 2, 2021

(54) HUMAN ALPHA-GALACTOSIDASE VARIANTS

(71) Applicant: Codexis, Inc., Redwood City, CA (US)

(72) Inventors: William Casey Hallows, San Francisco, CA (US); Nikki Dellas, San Carlos, CA (US); Yu Zhu, Newark, CA (US); Judy Victoria Antonio Viduya, South San Francisco, CA (US); Chinping Chng, Menlo Park, CA (US); Antoinette Sero, Foster City, CA (US); Rachel Cathleen Botham, Burlingame, CA (US); David William Homan, San Ramon, CA (US); Moulay Hicham Alaoui Ismaili, San Mateo, CA (US); Jonathan Vroom, South San Francisco, CA (US); Adam P. Silverman, San Carlos, CA (US); Kristen Jean Vallieu, Union City, CA (US); Charu Shukla Reddy, San Jose, CA (US); Kerryn McCluskie, Pacifica, CA (US)

(21) Appl. No.: 17/186,462

(22) Filed: Feb. 26, 2021

Related U.S. Application Data
(60) Provisional application No. 62/982,949, filed on Feb. 28, 2020.

(51) Int. Cl. C12N 9/40; C12N 15/85; C07K 1/14

(52) U.S. Cl. CPC C12N 9/2465; C12Y 302/01022; C07K 1/14; C12N 15/85

(57) ABSTRACT

The present invention provides engineered human alpha-galactosidase polypeptides and compositions thereof. The engineered human alpha-galactosidase polypeptides have been optimized to provide improved thermostability, serum stability, improved cellular uptake, stability under both acidic (pH<4) and basic (pH>7) conditions, reduced immunogenicity, and improved globotriaosylceramide removal from cells. The invention also relates to the use of the compositions comprising the engineered human alpha-galactosidase polypeptides for therapeutic purposes.

[0001] The present application claims priority to U.S. Prov. App In. Ser. No. 62/982,949, filed Feb. 28, 2020, hereby incorporated by reference in its entirety for all purposes.

### FIELD OF THE INVENTION

[0002] The present invention provides engineered human alpha-galactosidase polypeptides and compositions thereof. The engineered human alpha-galactosidase polypeptides have been optimized to provide improved thermostability, serum stability, reduced immunogenicity, improved cellular uptake, and stability under both acidic (pH<4) and basic (pH>7) conditions, and improved globotriaosylceramide clearance from cells. The invention also relates to the use of the compositions comprising the engineered human alpha-galactosidase polypeptides for therapeutic purposes.

### REFERENCE TO SEQUENCE LISTING, TABLE OR COMPUTER PROGRAM

[0003] The official copy of the Sequence Listing is submitted concurrently with the specification as an ASCII formatted text file via EFS-Web, with a filename of “CX7-203US2_ST25.txt”, a creation date of Feb. 23, 2021, and a size of 4.43 megabytes. The Sequence Listing filed via EFS-Web is part of the specification and is incorporated in its entirety by reference herein.

### BACKGROUND OF THE INVENTION

[0004] Human alpha galactosidase (“GLA”; EC 3.2.1.22) is a lysosomal glycoprotein responsible for hydrolyzing terminal alpha galactosyl moieties from glycolipids and glycoproteins. It works on many substrates present in a range of human tissues. Fabry disease (also referred to as angiokeratoma corporis diffusum, Anderson-Fabry disease, hereditary dystopic lipidosis, alpha-galactosidase A deficiency, GLA deficiency, and ceramide trihexosidase deficiency) is an X-linked inborn error of glycosphingolipid catabolism that results from deficient or absent activity of alpha-galactosidase A. Patients affected with Fabry disease accumulate globotriaosylceramide (referred to herein as “Gb₃” and “Gb3”) and related glycosphingolipids in the plasma and cellular lysosomes of blood vessels, tissue and organs (See e.g., Nance et al., Arch. Neurol., 63:453-457 [2006]). As the patient ages, the blood vessels become progressively narrowed, due to the accumulation of these lipids, resulting in decreased blood flow and nourishment to the tissues, particularly in the skin, kidneys, heart, brain, and nervous system. Thus, Fabry disease is a systemic disorder that manifests as renal failure, cardiac disease, cerebrovascular disease, small-fiber peripheral neuropathy, and skin lesions, as well as other disorders (See e.g., Schiffmann, Pharm. Ther., 122:65-77 [2009]). Affected patients exhibit symptoms such as painful hands and feet, clusters of small, dark red spots on their skin, the decreased ability to sweat, corneal opacity, gastrointestinal issues, tinnitus, and hearing loss. Potentially life-threatening complications include progressive renal damage, heart attacks, and stroke. This disease affects an estimated 1 in 40,000-60,000 males, but also occurs in females. Indeed, heterozygous women with Fabry disease experience significant life-threatening conditions including nervous system abnormalities, chronic pain, fatigue, high blood pressure, heart disease, kidney failure, and stroke, thus requiring medical treatment (See e.g., Want et al., Genet. Med., 13:457-484 [2011]). Signs of Fabry disease can start any time from infancy on, with signs usually beginning to show between ages 4 and 8, although some patients exhibit a milder, late-onset disease. Treatment is generally supportive and there is no cure for Fabry disease, thus there remains a need for a safe and effective treatment.

### SUMMARY OF THE INVENTION

[0005] The present invention provides engineered human alpha-galactosidase polypeptides and compositions thereof. The engineered human alpha-galactosidase polypeptides have been optimized to provide improved thermostability, serum stability, reduced immunogenicity, improved cellular uptake, and stability under both acidic (pH<4) and basic (pH>7) conditions, and improved globotriaosylceramide clearance from cells. The invention also relates to the use of the compositions comprising the engineered human alpha-galactosidase polypeptides for therapeutic purposes.

[0006] The present invention provides recombinant alpha galactosidase A and/or biologically active recombinant alpha galactosidase A fragment comprising an amino acid sequence comprising at least about 70%, at least about 75%, at least about 80%, at least about 85%, at least about 90%, at least about 91%, at least about 92%, at least about 93%, at least about 94%, at least about 95%, at least about 96%, at least about 97%, at least about 98%, or at least about 99% sequence identity to SEQ ID NO:8. The present invention provides recombinant alpha galactosidase A and/or biologically active recombinant alpha galactosidase A fragment comprising an amino acid sequence comprising at least 70%, at least 75%, at least 80%, at least 85%, at least 90%, at least 91%, at least 92%, at least 93%, at least 94%, at least 95%, at least 96%, at least 97%, at least 98%, or at least 99% sequence identity to SEQ ID NO:8.

[0007] The present invention also provides recombinant alpha galactosidase A wherein said comprises a polypeptide sequence having at least 85%, 86%, 87%, 88%, 89%, 90%, 91%, 92%, 93%, 94%, 95%, 96%, 97%, 98%, 99%, or more sequence identity to SEQ ID NO: 8, or a functional fragment thereof, and wherein said recombinant alpha galactosidase A comprises at least one substitution or substitution set at one or more positions selected from 44, 44/217, 44/217/316, 44/217/322, 44/217/322/337, 44/247, 44/247/302, 44/247/302/322, 44/247/322, 44/247/337, 44/247/362, 44/302, 44/337, 44/373, 217/322, 217/373, 247/322, 247/362, 302/322/362/373, 302/337, 316, 316/337, 322, 322/337, 362/373, and 373, wherein the amino acid positions of said polypeptide sequence are numbered with reference to SEQ ID NO: 8. In some embodiments, the recombinant alpha galactosidase A comprises a polypeptide sequence having at least 85%, 86%, 87%, 88%, 89%, 90%, 91%, 92%, 93%, 94%, 95%, 96%, 97%, 98%, 99%, or more sequence identity to SEQ ID NO: 8, or a functional fragment thereof, and wherein said recombinant alpha galactosidase A comprises at least one substitution or substitution set at one or more positions selected from 44L, 44L/217F, 44L/217F/316L, 44L/217F/322M, 44L/217F/322M/337A, 44L/247N, 44L/247N/302Q, 44L/247N/302Q/322M, 44L/247N/322M, 44L/247N/337A, 44L/247N/362K, 44L/302Q, 44L/337A, 44L/373R, 217F/322M, 217F/373R, 247N/322M, 247N/362K, 302Q/322M/362K/373R, 302Q/337A, 316L, 316L/337A, 322M, 322M/337A, 362K/373R, and 373R, wherein the amino acid positions of said polypeptide sequence are numbered with reference to SEQ ID NO: 8. In some embodiments, the recombinant alpha galactosidase A comprises a polypeptide sequence having at least 85%, 86%, 87%, 88%, 89%, 90%, 91%, 92%, 93%, 94%, 95%, 96%, 97%, 98%, 99%, or more sequence identity to SEQ ID NO: 8, or a functional fragment thereof, and wherein said recombinant alpha galactosidase A comprises at least one substitution or substitution set at one or more positions selected from R44L, R44L/R217F, R44L/R217F/D316L, R44L/R217F/I322M, R44L/R217F/I322M/P337A, R44L/D247N, R44L/D247N/K302Q, R44L/D247N/K302Q/I322M, R44L/D247N/I322M, R44L/D247N/P337A, R44L/D247N/Q362K, R44L/K302Q, R44L/P337A, R44L/K373R, R217F/I322M, R217F/K373R, D247N/I322M, D247N/Q362K, K302Q/I322M/Q362K/K373R, K302Q/P337A, D316L, D316L/P337A, I322M, I322M/P337A, Q362K/K373R, and K373R, wherein the amino acid positions of said polypeptide sequence are numbered with reference to SEQ ID NO: 8.

[0008] The present invention also provides recombinant alpha galactosidase A wherein said comprises a polypeptide sequence having at least 85%, 86%, 87%, 88%, 89%, 90%, 91%, 92%, 93%, 94%, 95%, 96%, 97%, 98%, 99%, or more sequence identity to SEQ ID NO: 8, or a functional fragment thereof, and wherein said recombinant alpha galactosidase A comprises at least one substitution or substitution set at one or more positions selected from 10/39/44/47/92/166/206/217/247/261/271/302/316/322/337/362/368/373/392, 44/217/316, 44/217/322/337, 166/362, 217/373, and 362/373, wherein the amino acid positions of said polypeptide sequence are numbered with reference to SEQ ID NO: 8. In some embodiments, the recombinant alpha galactosidase A comprises a polypeptide sequence having at least 85%, 86%, 87%, 88%, 89%, 90%, 91%, 92%, 93%, 94%, 95%, 96%, 97%, 98%, 99%, or more sequence identity to SEQ ID NO: 8, or a functional fragment thereof, and wherein said recombinant alpha galactosidase A comprises at least one substitution or substitution set at one or more positions selected from 10T/39M/44L/47S/92 Y/166S/206K/217F/247N/261A/271H/302Q/316L/322M/337A/362K/368W/37 3R/392M, 44L/217F/316L, 44L/217F/322M/337A, 166A/362K, 217F/373R, and 362K/373R, wherein the amino acid positions of said polypeptide sequence are numbered with reference to SEQ ID NO: 8. In some embodiments, the recombinant alpha galactosidase A comprises a polypeptide sequence having at least 85%, 86%, 87%, 88%, 89%, 90%, 91%, 92%, 93%, 94%, 95%, 96%, 97%, 98%, 99%, or more sequence identity to SEQ ID NO: 8, or a functional fragment thereof, and wherein said recombinant alpha galactosidase A comprises at least one substitution or substitution set at one or more positions selected from P10T/E39M/R44L/T47S/H92Y/P166S/A206K/R217F/D247N/G261A/A271H/K302Q/D316L/I322M/P337A/Q362K/A368W/K373R/T392M, R44L/R217F/D316L, R44L/R217F/I322M/P337A, P166A/Q362K, R217F/K373R, and Q362K/K373R, wherein the amino acid positions of said polypeptide sequence are numbered with reference to SEQ ID NO: 8.

[0009] The present invention also provides recombinant alpha galactosidase A wherein said comprises a polypeptide sequence having at least 85%, 86%, 87%, 88%, 89%, 90%, 91%, 92%, 93%, 94%, 95%, 96%, 97%, 98%, 99%, or more sequence identity to SEQ ID NO: 58, or a functional fragment thereof, and wherein said recombinant alpha galactosidase A comprises at least one substitution or substitution set at one or more positions selected from 7, 7/48/68, 7/48/68/120/282/299, 7/48/130/282, 7/48/180, 7/68/130/282/365, 7/68/180, 7/88/120/305/365, 7/120, 7/130, 7/282, 7/305, 7/305/365, 7/365, 39, 47, 47/87/95/96/158/162, 47/95, 47/273, 47/343, 48, 48/68, 48/180/282, 48/282, 48/282/305, 67/180, 68, 68/299/300, 71, 87/91/95/96/158/162, 87/91/95/96/206/343, 87/96/155/273/343, 88, 91/95, 91/95/96, 92, 93, 96, 96/273, 96/312/343, 120, 120/299/305, 151, 158, 158/162/273, 162, 162/273, 162/343, 166, 178, 180, 181, 206, 217, 271, 273, 273/343, 282, 282/365, 293/391, 299/300, 299/300/305/365, 300, 301, 305, 305/365, 314, 333, 336, 337, 343, 345, 363, 365, 370, 389, 393, 394, 396/398, 397, and 398, wherein the amino acid positions of said polypeptide sequence are numbered with reference to SEQ ID NO: 58. In some embodiments, the recombinant alpha galactosidase A comprises a polypeptide sequence having at least 85%, 86%, 87%, 88%, 89%, 90%, 91%, 92%, 93%, 94%, 95%, 96%, 97%, 98%, 99%, or more sequence identity to SEQ ID NO: 58, or a functional fragment thereof, and wherein said recombinant alpha galactosidase A comprises at least one substitution or substitution set at one or more positions selected from 7L, 7L/48D/68E, 7L/48D/68E/120H/282N/299R, 7L/48D/130E/282N, 7L/48D/180G, 7L/68E/130E/282N/365V, 7L/68E/180G, 7L/88A/120H/305G/365V, 7L/120H, 7L/130E, 7L/282N, 7L/305G, 7L/305G/365V, 7L/365V, 39V, 47D, 47D/87K/95E/96L/158R/162H, 47D/95E, 47D/273P, 47D/343G, 47V, 48D, 48D/68E, 48D/180G/282N, 48D/282N, 48D/282N/305G, 67T/180G, 68E, 68E/299R/300I, 71P, 87K/91Q/95E/96L/158A/162K, 87K/91Q/95E/96L/206S/343G, 87K/96I/155N/273P/343G, 88A, 91Q/95E, 91Q/95E/96L, 92F, 92T, 93I, 96L, 96L/273P, 96L/312Q/343G, 120H, 120H/299R/305G, 151L, 158A, 158A/162K/273G, 158R, 162H/343D, 162K, 162K/273P, 162S, 166K, 178G, 178S, 180G, 180L, 180T, 180V, 181A, 206K, 206S, 217K, 271R, 273P, 273P/343G, 282N, 282N/365V, 293P/391A, 299R/300I, 299R/300I/305G/365V, 300I, 301M, 305G, 305G/365V, 314A, 333F, 333G, 336V, 337R, 343D, 343G, 345A, 345Q, 363Q, 365A, 365Q, 365V, 370G, 389K, 393V, 394K, 396G/398T, 397A, 398A, 398P, 398S, and 398V, wherein the amino acid positions of said polypeptide sequence are numbered with reference to SEQ ID NO: 58. In some embodiments, the recombinant alpha galactosidase A comprises a polypeptide sequence having at least 85%, 86%, 87%, 88%, 89%, 90%, 91%, 92%, 93%, 94%, 95%, 96%, 97%, 98%, 99%, or more sequence identity to SEQ ID NO: 58, or a functional fragment thereof, and wherein said recombinant alpha galactosidase A comprises at least one substitution or substitution set at one or more positions selected from R7L, R7L/E48D/Q68E, R7L/E48D/Q68E/Y120H/D282N/Q299R, R7L/E48D/D130E/D282N, R7L/E48D/F180G, R7L/Q68E/D130E/D282N/F365V, R7L/Q68E/F180G, R7L/Q88A/Y120H/N305G/F365V, R7L/Y120H, R7L/D130E, R7L/D282N, R7L/N305G, R7L/N305G/F365V, R7L/F365V, E39V, T47D, T47D/R87K/S95E/K96L/L158R/R162H, T47D/S95E, T47D/S273P, T47D/K343G, T47V, E48D, E48D/Q68E, E48D/F180G/D282N, E48D/D282N, E48D/D282N/N305G, P67T/F180G, Q68E, Q68E/Q299R/L300I, S71P, R87K/N91Q/S95E/K96L/L158A/R162K, R87K/N91Q/S95E/K96L/A206S/K343G, R87K/K96I/H155N/S273P/K343G, Q88A, N91Q/S95E, N91Q/S95E/K96L, H92F, H92T, V93I, K96L, K96L/S273P, K96L/P312Q/K343G, Y120H, Y120H/Q299R/N305G, D151L, L158A, L158A/R162K/S273G, L158R, R162H/K343D, R162K, R162K/S273P, R162S, P166K, W178G, W178S, F180G, F180L, F180T, F180V, Q181A, A206K, A206S, R217K, A271R, S273P, S273P/K343G, D282N, D282N/F365V, L293P/Q391A, Q299R/L300I, Q299R/L300I/N305G/F365V, L300I, R301M, N305G, N305G/F365V, S314A, S333F, S333G, I336V, P337R, K343D, K343G, V345A, V345Q, L363Q, F365A, F365Q, F365V, S370G, T389K, S393V, L394K, D396G/L398T, L397A, L398A, L398P, L398S, and L398V, wherein the amino acid positions of said polypeptide sequence are numbered with reference to SEQ ID NO: 58.

[0010] The present invention also provides recombinant alpha galactosidase A wherein said comprises a polypeptide sequence having at least 85%, 86%, 87%, 88%, 89%, 90%, 91%, 92%, 93%, 94%, 95%, 96%, 97%, 98%, 99%, or more sequence identity to SEQ ID NO: 158, or a functional fragment thereof, and wherein said recombinant alpha galactosidase A comprises at least one substitution or substitution set at one or more positions selected from 24/202, 39/47, 39/47/217, 39/151, 39/282/337/398, 39/337/343/398, 39/393/398, 47/130, 47/151, 47/343/345/393, 48, 48/68, 48/68/217/333/391/393, 48/68/333, 48/217, 48/333, 48/345/393, 48/393, 59/143, 68, 68/345, 130, 130/158, 130/158/393, 130/345/393, 143/271, 143/333, 143/387, 151, 151/158/217/343/345/393, 151/206/282/337/343/345/398, 151/282/393, 151/345/393/398, 151/393, 158, 158/393, 202, 206, 206/217, 217, 217/333, 217/337/345/398, 271, 282/393, 333, 333/345, 337/343/345/398, 343, 343/345/393/398, 393, and 393/398, wherein the amino acid positions of said polypeptide sequence are numbered with reference to SEQ ID NO: 158. In some embodiments, the recombinant alpha galactosidase A comprises a polypeptide sequence having at least 85%, 86%, 87%, 88%, 89%, 90%, 91%, 92%, 93%, 94%, 95%, 96%, 97%, 98%, 99%, or more sequence identity to SEQ ID NO: 158, or a functional fragment thereof, and wherein said recombinant alpha galactosidase A comprises at least one substitution or substitution set at one or more positions selected from 24S/202N, 39V/47D, 39V/47V/217K, 39V/151L, 39V/282N/337R/398A, 39V/337R/343G/398A, 39V/393V/398A, 47V/130E, 47V/151L, 47V/343D/345Q/393V, 48D, 48D/68E, 48D/68E/217K/333F/391A/393V, 48D/68E/333F, 48D/217K, 48D/333F, 48D/333G, 48D/345Q/393V, 48D/393V, 59A/143S, 68E, 68E/345Q, 130E, 130E/158R, 130E/158R/393V, 130E/345Q/393V, 143S/271N, 143S/333N, 143S/387N, 151L, 151L/158R/217K/343G/345Q/393V, 151L/206S/282N/337R/343D/345Q/398A, 151L/282N/393V, 151L/345Q/393V/398A, 151L/393V, 158R, 158R/393V, 202N, 206S, 206S/217K, 217K, 217K/333F, 217K/333G, 217K/337R/345Q/398A, 271N, 282N/393V, 333F/345Q, 333G, 333N, 337R/343G/345Q/398A, 343D, 343D/345Q/393V/398A, 393V, and 393V/398A, wherein the amino acid positions of said polypeptide sequence are numbered with reference to SEQ ID NO: 158. In some embodiments, the recombinant alpha galactosidase A comprises a polypeptide sequence having at least 85%, 86%, 87%, 88%, 89%, 90%, 91%, 92%, 93%, 94%, 95%, 96%, 97%, 98%, 99%, or more sequence identity to SEQ ID NO: 8, or a functional fragment thereof, and wherein said recombinant alpha galactosidase A comprises at least one substitution or substitution set at one or more positions selected from D24S/D202N, E39V/T47D, E39V/T47V/R217K, E39V/D151L, E39V/D282N/P337R/L398A, E39V/P337R/K343G/L398A, E39V/S393V/L398A, T47V/D130E, T47V/D151L, T47V/K343D/V345Q/5393V, E48D, E48D/Q68E, E48D/Q68E/R217K/5333F/Q391A/5393V, E48D/Q68E/S333F, E48D/R217K, E48D/S333F, E48D/S333G, E48D/V345Q/5393V, E48D/S393V, C59A/C143S, Q68E, Q68E/V345Q, D130E, D130E/L158R, D130E/L158R/5393V, D130E/V345Q/5393V, C143S/A271N, C143S/S333N, C143S/E387N, D151L, D151L/L158R/R217K/K343G/V345Q/5393V, D151L/A206S/D282N/P337R/K343D/V345Q/L398A, D151L/D282N/5393V, D151L/V345Q/5393V/L398A, D151L/5393V, L158R, L158R/5393V, D202N, A206S, A206S/R217K, R217K, R217K/5333F, R217K/5333G, R217K/P337R/V345Q/L398A, A271N, D282N/S393V, 5333F/V345Q, S333G, S333N, P337R/K343G/V345Q/L398A, K343D, K343D/V345Q/5393V/L398A, S393V, and S393V/L398A, wherein the amino acid positions of said polypeptide sequence are numbered with reference to SEQ ID NO: 158.

[0011] The present invention also provides recombinant alpha galactosidase A wherein said comprises a polypeptide sequence having at least 85%, 86%, 87%, 88%, 89%, 90%, 91%, 92%, 93%, 94%, 95%, 96%, 97%, 98%, 99%, or more sequence identity to SEQ ID NO: 372, or a functional fragment thereof, and wherein said recombinant alpha galactosidase A comprises at least one substitution or substitution set at one or more positions selected from 10, 10/39/44/322, 10/39/92/206/217/271, 10/39/92/247, 10/39/92/247/271/316, 10/44, 10/44/47/92/247, 10/44/47/261/302/322/368, 10/44/92/316/322, 10/44/261/302/316, 10/44/302/337/368, 10/47/217/247/316/392, 10/47/217/322, 10/47/271, 10/92, 10/92/206/217/247, 10/92/206/247/316/322/392, 10/92/206/247/322/368, 10/92/217/261/302/337, 10/206/217/271, 10/206/247, 10/206/261/271/316, 10/261, 10/271/302, 10/302, 10/302/316, 10/302/322/337, 10/316/322, 10/337/392, 10/368, 39/44/92/162/247/302/316/322, 39/44/92/217/322, 39/44/92/247/271/302, 39/47/92/247/302/316/322, 39/47/217/247/368, 39/47/247, 39/92/247/302/316/337/368, 39/92/316/322, 39/247/271, 39/247/271/316, 39/322, 44/47/92/206/217/316/322, 44/47/92/247/261/271/316/337/368, 44/47/206/217/247/271/322, 44/47/247/322/368, 44/47/302/316/322, 44/92/206/247/368, 44/206/337, 44/247/261/302/316, 44/247/261/302/316/322, 47/92/247/271, 47/217/302, 47/247, 47/247/271, 89/217/247/261/302/316, 92/217/271, 92/247, 92/247/271/322, 92/247/302/322/337, 92/271/337, 92/302, 92/316, 206/217/271/392, 217/247/316/322/337/368, 247, 247/271, 247/302, 271, 271/302/322, 271/316/322, 302/322/368, and 368, wherein the amino acid positions of said polypeptide sequence are numbered with reference to SEQ ID NO: 372. In some embodiments, the recombinant alpha galactosidase A comprises a polypeptide sequence having at least 85%, 86%, 87%, 88%, 89%, 90%, 91%, 92%, 93%, 94%, 95%, 96%, 97%, 98%, 99%, or more sequence identity to SEQ ID NO: 372, or a functional fragment thereof, and wherein said recombinant alpha galactosidase A comprises at least one substitution or substitution set at one or more positions selected from 10P, 10P/39E/44R/322i, 10P/39E/92H/206A/217R/271A, 10P/39E/92H/247D, 10P/39E/92H/247D/271A/316D, 10P/44R, 10P/44R/47T/92H/247D, 10P/44R/47T/261G/302K/322I/368A, 10P/44R/92H/316D/322I, 10P/44R/261G/302K/316D, 10P/44R/302K/337P/368A, 10P/47T/217R/247D/316D/392T, 10P/47T/217R/322I, 10P/47T/271A, 10P/92H, 10P/92H/206A/217R/247D, 10P/92H/206A/247D/316D/322I/392T, 10P/92H/206A/247D/322I/368A, 10P/92H/217R/261G/302K/337P, 10P/206A/217R/271A, 10P/206A/247D, 10P/206A/261G/271A/316D, 10P/261G, 10P/271A/302K, 10P/302K, 10P/302K/316D, 10P/302K/322I/337P, 10P/316D/322I, 10P/337P/392T, 10P/368A, 39E/44R/92H/162M/247D/302K/316D/322I, 39E/44R/92H/217R/322I, 39E/44R/92H/247D/271A/302K, 39E/47T/92H/247D/302K/316D/322I, 39E/47T/217R/247D/368A, 39E/47T/247D, 39E/92H/247D/302K/316D/337P/368A, 39E/92H/316D/322I, 39E/247D/271A, 39E/247D/271A/316D, 39E/322I, 44R/47T/92H/206A/217R/316D/322I, 44R/47T/92H/247D/261G/271A/316D/337P/368A, 44R/47T/206A/217R/247D/271A/322I, 44R/47T/247D/322I/368A, 44R/47T/302K/316D/322I, 44R/92H/206A/247D/368A, 44R/206A/337P, 44R/247D/261G/302K/316D, 44R/247D/261G/302K/316D/322I, 47T/92H/247D/271A, 47T/217R/302K, 47T/247D, 47T/247D/271A, 89I/217R/247D/261G/302K/316D, 92H/217R/271A, 92H/247D, 92H/247D/271A/322I, 92H/247D/302K/322I/337P, 92H/271A/337P, 92H/302K, 92H/316D, 206A/217R/271A/392T, 217R/247D/316D/322I/337P/368A, 247D, 247D/271A, 247D/302K, 271A, 271A/302K/322I, 271A/316D/322I, 302K/322I/368A, and 368A, wherein the amino acid positions of said polypeptide sequence are numbered with reference to SEQ ID NO: 372. In some embodiments, the recombinant alpha galactosidase A comprises a polypeptide sequence having at least 85%, 86%, 87%, 88%, 89%, 90%, 91%, 92%, 93%, 94%, 95%, 96%, 97%, 98%, 99%, or more sequence identity to SEQ ID NO: 372, or a functional fragment thereof, and wherein said recombinant alpha galactosidase A comprises at least one substitution or substitution set at one or more positions selected from T10P, T10P/M39E/L44R/M322I, T10P/M39E/Y92H/K206A/F217R/H271A, T10P/M39E/Y92H/N247D, T10P/M39E/Y92H/N247D/H271A/L316D, T10P/L44R, T10P/L44R/S47T/Y92H/N247D, T10P/L44R/S47T/A261G/Q302K/M322I/W368A, T10P/L44R/Y92H/L316D/M322I, T10P/L44R/A261G/Q302K/L316D, T10P/L44R/Q302K/A337P/W368A, T10P/S47T/F217R/N247D/L316D/M392T, T10P/S47T/F217R/M322I, T10P/S47T/H271A, T10P/Y92H, T10P/Y92H/K206A/F217R/N247D, T10P/Y92H/K206A/N247D/L316D/M322I/M392T, T10P/Y92H/K206A/N247D/M322I/W368A, T10P/Y92H/F217R/A261G/Q302K/A337P, T10P/K206A/F217R/H271A, T10P/K206A/N247D, T10P/K206A/A261G/H271A/L316D, T10P/A261G, T10P/H271A/Q302K, T10P/Q302K, T10P/Q302K/L316D, T10P/Q302K/M322I/A337P, T10P/L316D/M322I, T10P/A337P/M392T, T10P/W368A, M39E/L44R/Y92H/R162M/N247D/Q302K/L316D/M322I, M39E/L44R/Y92H/F217R/M322I, M39E/L44R/Y92H/N247D/H271A/Q302K, M39E/S47T/Y92H/N247D/Q302K/L316D/M322I, M39E/S47T/F217R/N247D/W368A, M39E/S47T/N247D, M39E/Y92H/N247D/Q302K/L316D/A337P/W368A, M39E/Y92H/L316D/M322I, M39E/N247D/H271A, M39E/N247D/H271A/L316D, M39E/M322I, L44R/S47T/Y92H/K206A/F217R/L316D/M322I, L44R/S47T/Y92H/N247D/A261G/H271A/L316D/A337P/W368A, L44R/S47T/K206A/F217R/N247D/H271A/M322I, L44R/S47T/N247D/M322I/W368A, L44R/S47T/Q302K/L316D/M322I, L44R/Y92H/K206A/N247D/W368A, L44R/K206A/A337P, L44R/N247D/A261G/Q302K/L316D, L44R/N247D/A261G/Q302K/L316D/M322I, S47T/Y92H/N247D/H271A, S47T/F217R/Q302K, S47T/N247D, S47T/N247D/H271A, L89I/F217R/N247D/A261G/Q302K/L316D, Y92H/F217R/H271A, Y92H/N247D, Y92H/N247D/H271A/M322I, Y92H/N247D/Q302K/M322I/A337P, Y92H/H271A/A337P, Y92H/Q302K, Y92H/L316D, K206A/F217R/H271A/M392T, F217R/N247D/L316D/M322I/A337P/W368A, N247D, N247D/H271A, N247D/Q302K, H271A, H271A/Q302K/M322I, H271A/L316D/M322I, Q302K/M322I/W368A, and W368A, wherein the amino acid positions of said polypeptide sequence are numbered with reference to SEQ ID NO: 372.

[0012] The present invention also provides recombinant alpha galactosidase A wherein said comprises a polypeptide sequence having at least 85%, 86%, 87%, 88%, 89%, 90%, 91%, 92%, 93%, 94%, 95%, 96%, 97%, 98%, 99%, or more sequence identity to SEQ ID NO: 374, or a functional fragment thereof, and wherein said recombinant alpha galactosidase A comprises at least one substitution or substitution set at one or more positions selected from 10/36/92/166/247/261/316/392, 10/39, 10/39/44/47/92/206/217, 10/39/44/47/316, 10/39/44/47/337, 10/39/44/92/166/261/316/322, 10/39/44/92/166/302/322, 10/39/44/92/166/392, 10/39/44/92/217/302/322, 10/39/44/92/302/322, 10/39/44/166/261/271/316/322, 10/39/44/392, 10/39/47/92/337, 10/39/92/131/166/271/316/322, 10/39/92/166/217/247/271, 10/39/92/217/316, 10/44/47/166/261/271, 10/44/47/166/271/322/368, 10/44/47/217/271/316/322, 10/44/92, 10/44/92/217/247/271/302/316/392, 10/44/166/302, 10/44/206/316/322, 10/47/92/166/271/316/337, 10/47/92/271/302, 10/47/92/316/322/392, 10/47/166/271, 10/47/166/316, 10/92/166, 10/92/166/217/247/261/271, 10/92/166/261/271/392, 10/92/166/261/316/322/337, 10/92/166/337/368, 10/92/302/337, 10/92/316/322, 10/206, 10/206/247/261, 10/217/322, 10/261, 10/261/337/392, 10/316/392, 10/368, 39/44/47/92/166/206/392, 39/44/47/92/206/247/261, 39/44/47/92/206/392, 39/44/47/206/337/368/392, 39/44/92/166/247/261/302/337, 39/44/166/271, 39/44/166/271/337/368/392, 39/47/92/316/322, 39/47/92/392, 39/47/166/217/261/392, 39/47/217/247/368, 39/47/247, 39/92/166/217/392, 39/92/261/302, 39/166/217/261/316/368, 39/322, 39/392, 44/47, 44/47/92/217/271, 44/47/92/217/316/322/392, 44/47/92/392, 44/47/166, 44/47/166/271, 44/47/247/271/392, 44/316/322/392, 44/337, 47/166/206/217/247/337, 47/166/217/271/337, 47/206, 47/217/247/261, 47/271, 52/217/302/316, 92/166/206/271/316, 92/166/217/261/271/392, 92/166/217/316/337/392, 92/166/247, 92/166/316, 92/206/322, 92/217, 92/217/271/337, 92/261/271, 92/271, 166/217/316/322/337, 166/247/271/316, 166/316/322/337, 206/217, 217/392, 247/316, 316/322/368, and 316/337/392, wherein the amino acid positions of said polypeptide sequence are numbered with reference to SEQ ID NO: 374. In some embodiments, the recombinant alpha galactosidase A comprises a polypeptide sequence having at least 85%, 86%, 87%, 88%, 89%, 90%, 91%, 92%, 93%, 94%, 95%, 96%, 97%, 98%, 99%, or more sequence identity to SEQ ID NO: 374, or a functional fragment thereof, and wherein said recombinant alpha galactosidase A comprises at least one substitution or substitution set at one or more positions selected from 10T/36M/92Y/166S/247N/261A/316L/392M, 10T/39M, 10T/39M/44L/47S/92Y/206K/217F, 10T/39M/44L/47S/316L, 10T/39M/44L/47S/337A, 10T/39M/44L/92Y/166S/261A/316L/322M, 10T/39M/44L/92Y/166S/302Q/322M, 10T/39M/44L/92Y/166S/392M, 10T/39M/44L/92Y/217F/302Q/322M, 10T/39M/44L/92Y/302Q/322M, 10T/39M/44L/166S/261A/271H/316L/322M, 10T/39M/44L/392M, 10T/39M/47S/92Y/337A, 10T/39M/92Y/131G/166S/271H/316L/322M, 10T/39M/92Y/166S/217F/247N/271H, 10T/39M/92Y/217F/316L, 10T/44L/47S/166S/261A/271H, 10T/44L/47S/166S/271H/322M/368W, 10T/44L/47S/217F/271H/316L/322M, 10T/44L/92Y, 10T/44L/92Y/217F/247N/271H/302Q/316L/392M, 10T/44L/166S/302Q, 10T/44L/206K/316L/322M, 10T/47S/92 Y/166S/271H/316L/337A, 10T/47S/92Y/271H/302Q, 10T/47S/92Y/316L/322M/392M, 10T/47S/166S/271H, 10T/47S/166S/316L, 10T/92Y/166S, 10T/92Y/166S/217F/247N/261A/271H, 10T/92Y/166S/261A/271H/392M, 10T/92Y/166S/261A/316L/322M/337A, 10T/92Y/166S/337A/368W, 10T/92Y/302Q/337A, 10T/92Y/316L/322M, 10T/206K, 10T/206K/247N/261A, 10T/217F/322M, 10T/261A, 10T/261A/337A/392M, 10T/316L/392M, 10T/368W, 39M/44L/47S/92 Y/166S/206K/392M, 39M/44L/47S/92Y/206K/247N/261A, 39M/44L/47S/92Y/206K/392M, 39M/44L/47S/206K/337A/368W/392M, 39M/44L/92Y/166S/247N/261A/302Q/337A, 39M/44L/166S/271H, 39M/44L/166S/271H/337A/368W/392M, 39M/47S/92Y/316L/322M, 39M/47S/92Y/392M, 39M/47S/166S/217F/261A/392M, 39M/47S/217F/247N/368W, 39M/47S/247N, 39M/92Y/166S/217F/392M, 39M/92Y/261A/302Q, 39M/166S/217F/261A/316L/368W, 39M/322M, 39M/392M, 44L/47S, 44L/47S/92Y/217F/271H, 44L/47S/92 Y/217F/316L/322M/392M, 44L/47S/92Y/392M, 44L/47S/166S, 44L/47S/166S/271H, 44L/47S/247N/271H/392M, 44L/316L/322M/392M, 44L/337A, 47S/166S/206K/217F/247N/337A, 47S/166S/217F/271H/337A, 47S/206K, 47S/217F/247N/261A, 47S/271H, 52N/217F/302Q/316L, 92Y/166S/206K/271H/316L, 92Y/166S/217F/261A/271H/392M, 92Y/166S/217F/316L/337A/392M, 92Y/166S/247N, 92Y/166S/316L, 92Y/206K/322M, 92Y/217F, 92Y/217F/271H/337A, 92Y/261A/271H, 92Y/271H, 166S/217F/316L/322M/337A, 166S/247N/271H/316L, 166S/316L/322M/337A, 206K/217F, 217F/392M, 247N/316L, 316L/322M/368W, and 316L/337A/392M, wherein the amino acid positions of said polypeptide sequence are numbered with reference to SEQ ID NO: 374. In some embodiments, the recombinant alpha galactosidase A comprises a polypeptide sequence having at least 85%, 86%, 87%, 88%, 89%, 90%, 91%, 92%, 93%, 94%, 95%, 96%, 97%, 98%, 99%, or more sequence identity to SEQ ID NO: 374, or a functional fragment thereof, and wherein said recombinant alpha galactosidase A comprises at least one substitution or substitution set at one or more positions selected from P10T/K36M/H92Y/P166S/D247N/G261A/D316L/T392M, P10T/E39M, P10T/E39M/R44L/T47S/H92Y/A206K/R217F, P10T/E39M/R44L/T47S/D316L, P10T/E39M/R44L/T47S/P337A, P10T/E39M/R44L/H92Y/P166S/G261A/D316L/I322M, P10T/E39M/R44L/H92Y/P166S/K302Q/I322M, P10T/E39M/R44L/H92Y/P166S/T392M, P10T/E39M/R44L/H92Y/R217F/K302Q/I322M, P10T/E39M/R44L/H92Y/K302Q/I322M, P10T/E39M/R44L/P166S/G261A/A271H/D316L/I322M, P10T/E39M/R44L/T392M, P10T/E39M/T47S/H92Y/P337A, P10T/E39M/H92Y/W131G/P166S/A271H/D316L/I322M, P10T/E39M/H92Y/P166S/R217F/D247N/A271H, P10T/E39M/H92Y/R217F/D316L, P10T/R44L/T47S/P166S/G261A/A271H, P10T/R44L/T47S/P166S/A271H/I322M/A368W, P10T/R44L/T47S/R217F/A271H/D316L/I322M, P10T/R44L/H92Y, P10T/R44L/H92Y/R217F/D247N/A271H/K302Q/D316L/T392M, P10T/R44L/P166S/K302Q, P10T/R44L/A206K/D316L/I322M, P10T/T47S/H92Y/P166S/A271H/D316L/P337A, P10T/T47S/H92Y/A271H/K302Q, P10T/T47S/H92Y/D316L/I322M/T392M, P10T/T47S/P166S/A271H, P10T/T47S/P166S/D316L, P10T/H92Y/P166S, P10T/H92Y/P166S/R217F/D247N/G261A/A271H, P10T/H92Y/P166S/G261A/A271H/T392M, P10T/H92Y/P166S/G261A/D316L/I322M/P337A, P10T/H92Y/P166S/P337A/A368W, P10T/H92Y/K302Q/P337A, P10T/H92Y/D316L/I322M, P10T/A206K, P10T/A206K/D247N/G261A, P10T/R217F/I322M, P10T/G261A, P10T/G261A/P337A/T392M, P10T/D316L/T392M, P10T/A368W, E39M/R44L/T47S/H92Y/P166S/A206K/T392M, E39M/R44L/T47S/H92Y/A206K/D247N/G261A, E39M/R44L/T47S/H92Y/A206K/T392M, E39M/R44L/T47S/A206K/P337A/A368W/T392M, E39M/R44L/H92Y/P166S/D247N/G261A/K302Q/P337A, E39M/R44L/P166S/A271H, E39M/R44L/P166S/A271H/P337A/A368W/T392M, E39M/T47S/H92Y/D316L/I322M, E39M/T47S/H92Y/T392M, E39M/T47S/P166S/R217F/G261A/T392M, E39M/T47S/R217F/D247N/A368W, E39M/T47S/D247N, E39M/H92Y/P166S/R217F/T392M, E39M/H92Y/G261A/K302Q, E39M/P166S/R217F/G261A/D316L/A368W, E39M/I322M, E39M/T392M, R44L/T47S, R44L/T47S/H92Y/R217F/A271H, R44L/T47S/H92Y/R217F/D316L/1322M/T392M, R44L/T47S/H92Y/T392M, R44L/T47S/P166S, R44L/T47S/P166S/A271H, R44L/T47S/D247N/A271H/T392M, R44L/D316L/1322M/T392M, R44L/P337A, T47S/P166S/A206K/R217F/D247N/P337A, T47S/P166S/R217F/A271H/P337A, T47S/A206K, T47S/R217F/D247N/G261A, T47S/A271H, D52N/R217F/K302Q/D316L, H92Y/P166S/A206K/A271H/D316L, H92Y/P166S/R217F/G261A/A271H/T392M, H92Y/P166S/R217F/D316L/P337A/T392M, H92Y/P166S/D247N, H92Y/P166S/D316L, H92Y/A206K/I322M, H92Y/R217F, H92Y/R217F/A271H/P337A, H92Y/G261A/A271H, H92Y/A271H, P166S/R217F/D316L/1322M/P337A, P166S/D247N/A271H/D316L, P166S/D316L/1322M/P337A, A206K/R217F, R217F/T392M, D247N/D316L, D316L/I322M/A368W, and D316L/P337A/T392M, wherein the amino acid positions of said polypeptide sequence are numbered with reference to SEQ ID NO: 374.

[0013] The present invention also provides recombinant alpha galactosidase A wherein said comprises a polypeptide sequence having at least 85%, 86%, 87%, 88%, 89%, 90%, 91%, 92%, 93%, 94%, 95%, 96%, 97%, 98%, 99%, or more sequence identity to SEQ ID NO: 704, or a functional fragment thereof, and wherein said recombinant alpha galactosidase A comprises at least one substitution or substitution set at one or more positions selected from 2, 4, 5, 24/59, 24/143/144, 24/143/202/333, 24/143/202/352/390/391, 24/143/333/352/387/390/391, 24/143/390/391, 24/202, 24/202/271, 24/202/333/352, 24/271/352, 24/352/387/390/391, 24/387/391, 31, 40, 59, 59/143, 59/143/202, 59/143/202/271/333, 59/143/271, 59/143/333, 59/202, 59/202/333, 59/271/387/390, 73, 76, 80, 83, 84, 91/215/361, 122, 123, 143, 143/202, 143/271, 143/271/352/390, 143/333, 143/333/387/390, 143/387/391, 147, 155, 164, 165, 179, 186, 202, 202/333, 210, 215/218, 218, 218/361, 218/361/398, 218/398, 246, 254/398, 271, 271/333, 271/333/390/391, 271/333/391, 271/352/391, 273, 275, 277, 278, 280, 281, 283, 284, 287, 300, 303, 304, 325, 331, 332, 333/352, 333/390/391, 333/391, 334, 335, 336, 338, 339, 340, 341, 343, 359, 360, 361, 362, 367, 369, 371, 373, 375, 377, 382, 382/398, 385, 387/391, 390, and 398, wherein the amino acid positions of said polypeptide sequence are numbered with reference to SEQ ID NO: 704. In some embodiments, the recombinant alpha galactosidase A comprises a polypeptide sequence having at least 85%, 86%, 87%, 88%, 89%, 90%, 91%, 92%, 93%, 94%, 95%, 96%, 97%, 98%, 99%, or more sequence identity to SEQ ID NO: 704, or a functional fragment thereof, and wherein said recombinant alpha galactosidase A comprises at least one substitution or substitution set at one or more positions selected from 2S, 4L, 5M, 5V, 24S/59A, 24S/143S/144N, 24S/143S/202N/333N, 24S/143S/202N/352N/390N/391N, 24S/143S/333N/352N/387N/390T/391N, 24S/143S/390T/391N, 24S/202N, 24S/202N/271N, 24S/202N/333N/352N, 24S/271N/352N, 24S/352N/387N/390N/391N, 24S/387N/391N, 31F, 31H, 31L, 31T, 31W, 40Q, 59A, 59A/143S, 59A/143S/271N, 59A/202N, 59T, 59T/143S/202N, 59T/143S/333N, 59T/202N/333N, 59V/143S/202N/271N/333N, 59V/271N/387N/390T, 73A, 76A, 76F, 76M, 76S, 80T, 83R, 83S, 84G, 84K, 84R, 91S/215S/361T, 122E, 122N, 122S, 123Q, 123R, 123S, 123T, 143S, 143S/202N, 143S/271N, 143S/271N/352N/390N, 143S/333N, 143S/333N/387N/390T, 143S/387N/391N, 147L, 147S, 155A, 155D, 155F, 155L, 155R, 155T, 164E, 1651, 179H, 179L, 179R, 179W, 186E, 186F, 186M, 186P, 186R, 186S, 186Y, 202N, 202N/333N, 2101, 215S/218Y, 218Y, 218Y/361T, 218Y/361T/398F, 218Y/398F, 246Y, 254T/398F, 271N, 271N/333N, 271N/333N/390N/391N, 271N/333N/391N, 271N/352N/391N, 273L, 275A, 275G, 277Q, 277V, 278N, 278R, 278S, 280G, 2811, 281M, 283L, 283P, 283T, 283V, 284A, 284E, 284G, 284L, 284M, 284R, 284S, 287R, 300F, 303A, 303C, 303W, 304T, 304V, 304W, 325A, 331M, 332G, 332H, 333N/352N, 333N/390N/391N, 333N/390S/391N, 333N/391N, 334C, 334V, 335A, 335L, 336F, 336G, 336S, 336T, 338L, 339G, 339N, 339Q, 339V, 340H, 340I, 340K, 340M, 340P, 340W, 341F, 341M, 343L, 343R, 343S, 343W, 359F, 359L, 359R, 360H, 360V, 361T, 361V, 362H, 367A, 367D, 367L, 367M, 369D, 371G, 373L, 373S, 375L, 375Q, 377Q, 382I, 382I/398F, 385R, 387N/391N, 390S, and 398F, wherein the amino acid positions of said polypeptide sequence are numbered with reference to SEQ ID NO: 704. In some embodiments, the recombinant alpha galactosidase A comprises a polypeptide sequence having at least 85%, 86%, 87%, 88%, 89%, 90%, 91%, 92%, 93%, 94%, 95%, 96%, 97%, 98%, 99%, or more sequence identity to SEQ ID NO: 704, or a functional fragment thereof, and wherein said recombinant alpha galactosidase A comprises at least one substitution or substitution set at one or more positions selected from D2S, G4L, LSM, LSV, D24S/C59A, D24S/C143S/D144N, D24S/C143S/D202N/G333N, D24S/C143S/D202N/F352N/M390N/Q391N, D24S/C143S/G333N/F352N/E387N/M390T/Q391N, D24S/C143S/M390T/Q391N, D24S/D202N, D24S/D202N/A271N, D24S/D202N/G333N/F352N, D24S/A271N/F352N, D24S/F352N/E387N/M390N/Q391N, D24S/E387N/Q391N, S31F, S31H, S31L, S31T, S31W, E40Q, C59A, C59A/C143S, C59A/C143S/A271N, C59A/D202N, C59T, C59T/C143S/D202N, C59T/C143S/G333N, C59T/D202N/G333N, C59V/C143S/D202N/A271N/G333N, C59V/A271N/E387N/M390T, G73A, Q76A, Q76F, Q76M, Q76S, Q80T, P83R, P83S, H84G, H84K, H84R, N91S/T215S/R361T, D122E, D122N, D122S, I123Q, I123R, I123S, I123T, C143S, C143S/D202N, C143S/A271N, C143S/A271N/F352N/M390N, C143S/G333N, C143S/G333N/E387N/M390T, C143S/E387N/Q391N, E147L, E147S, H155A, H155D, H155F, H155L, H155R, H155T, G164E, R1651, P179H, P179L, P179R, P179W, T186E, T186F, T186M, T186P, T186R, T186S, T186Y, D202N, D202N/G333N, S2101, T215S/N218Y, N218Y, N218Y/R361T, N218Y/R361T/L398F, N218Y/L398F, W246Y, A254T/L398F, A271N, A271N/G333N, A271N/G333N/M390N/Q391N, A271N/G333N/Q391N, A271N/F352N/Q391N, S273L, Q275A, Q275G, K277Q, K277V, A278N, A278R, A278S, L280G, Q2811, Q281M, K283L, K283P, K283T, K283V, D284A, D284E, D284G, D284L, D284M, D284R, D284S, A287R, L300F, G303A, G303C, G303W, D304T, D304V, D304W, R325A, P331M, R332G, R332H, G333N/F352N, G333N/M390N/Q391N, G333N/M390S/Q391N, G333N/Q391N, Y334C, Y334V, T335A, T335L, I336F, I336G, 1336S, I336T, V338L, A339G, A339N, A339Q, A339V, S340H, S340I, S340K, S340M, S340P, S340W, L341F, L341M, K343L, K343R, K343S, K343W, V359F, V359L, V359R, K360H, K360V, R361T, R361V, K362H, E367A, E367D, E367L, E367M, T369D, R371G, R373L, R373S, H375L, H375Q, N377Q, V382I, V382I/L398F, Q385R, E387N/Q391N, M390S, and L398F, wherein the amino acid positions of said polypeptide sequence are numbered with reference to SEQ ID NO: 704.

[0014] The present invention also provides recombinant alpha galactosidase A wherein said comprises a polypeptide sequence having at least 85%, 86%, 87%, 88%, 89%, 90%, 91%, 92%, 93%, 94%, 95%, 96%, 97%, 98%, 99%, or more sequence identity to SEQ ID NO: 374, or a functional fragment thereof, and wherein said recombinant alpha galactosidase A comprises at least one substitution or substitution set at one or more positions selected from 10, 39, 44, 47, 92, 166, 206, 217, 247, 261, 271, 302, 316, 322, 337, 368, and 392, wherein the amino acid positions of said polypeptide sequence are numbered with reference to SEQ ID NO: 374. In some embodiments, the recombinant alpha galactosidase A comprises a polypeptide sequence having at least 85%, 86%, 87%, 88%, 89%, 90%, 91%, 92%, 93%, 94%, 95%, 96%, 97%, 98%, 99%, or more sequence identity to SEQ ID NO: 374, or a functional fragment thereof, and wherein said recombinant alpha galactosidase A comprises at least one substitution or substitution set at one or more positions selected from 10A, 10C, 10D, 10E, 10F, 10G, 10H, 10I, 10K, 10L, 10M, 10N, 10Q, 10R, 10S, 10T, 10y, 10W, 10Y, 39A, 39C, 39D, 39F, 39G, 39H, 39I, 39K, 39L, 39M, 39N, 39P, 39Q, 39R, 39S, 39T, 39V, 39W, 39Y, 44A, 44C, 44D, 44E, 44F, 44G, 44H, 44I, 44K, 44L, 44N, 44P, 44Q, 44S, 44T, 44V, 44W, 44Y, 47A, 47C, 47D, 47E, 47F, 47G, 47H, 47I, 47K, 47L, 47M, 47N, 47P, 47Q, 47R, 47S, 47V, 47W, 47Y, 92A, 92C, 92D, 92E, 92F, 92G, 92I, 92K, 92L, 92M, 92N, 92P, 92Q, 92R, 92S, 92T, 92V, 92W, 92Y, 166A, 166C, 166D, 166E, 166F, 166G, 166H, 166I, 166K, 166L, 166M, 166N, 166Q, 166R, 166S, 166T, 166V, 166W, 166Y, 206C, 206D, 206E, 206F, 206G, 206H, 206I, 206K, 206L, 206M, 206N, 206P, 206Q, 206R, 206S, 206T, 206V, 206W, 206Y, 217A, 217C, 217D, 217E, 217F, 217G, 217H, 217I, 217K, 217L, 217M, 217N, 217P, 217Q, 217S, 217T, 217V, 217W, 217Y, 247A, 247C, 247E, 247F, 247G, 247H, 247I, 247K, 247L, 247M, 247N, 247P, 247Q, 247R, 247S, 247T, 247V, 247W, 247Y, 261A, 261C, 261D, 261E, 261F, 261H, 261I, 261K, 261L, 261M, 261N, 261P, 261Q, 261R, 261S, 261T, 261V, 261W, 261Y, 271C, 271D, 271E, 271F, 271G, 271H, 271I, 271K, 271L, 271M, 271N, 271P, 271Q, 271R, 271S, 271T, 271V, 271W, 271Y, 302A, 302C, 302D, 302E, 302F, 302G, 302H, 302I, 302L, 302M, 302N, 302P, 302Q, 302R, 302S, 302T, 302V, 302W, 302Y, 316A, 316C, 316E, 316F, 316G, 316H, 316I, 316K, 316L, 316M, 316N, 316P, 316Q, 316R, 316S, 316T, 316V, 316W, 316Y, 322A, 322C, 322D, 322E, 322F, 322G, 322H, 322K, 322L, 322M, 322N, 322P, 322Q, 322R, 322S, 322T, 322V, 322W, 322Y, 337A, 337C, 337D, 337E, 337F, 337G, 337H, 337I, 337K, 337L, 337M, 337N, 337Q, 337R, 337S, 337T, 337V, 337W, 337Y, 368C, 368D, 368E, 368F, 368G, 368H, 368I, 368K, 368L, 368M, 368N, 368P, 368Q, 368R, 368S, 368T, 368V, 368W, 368Y, 392A, 392C, 392D, 392E, 392F, 392G, 392H, 392I, 392K, 392L, 392M, 392N, 392P, 392Q, 392R, 392S, 392V, 392W, and 392Y, wherein the amino acid positions of said polypeptide sequence are numbered with reference to SEQ ID NO: 374. In some embodiments, the recombinant alpha galactosidase A comprises a polypeptide sequence having at least 85%, 86%, 87%, 88%, 89%, 90%, 91%, 92%, 93%, 94%, 95%, 96%, 97%, 98%, 99%, or more sequence identity to SEQ ID NO: 374, or a functional fragment thereof, and wherein said recombinant alpha galactosidase A comprises at least one substitution or substitution set at one or more positions selected from P10A, P10C, P10D, P10E, P10F, P10G, P10H, P10I, P10K, P10L, P10M, P10N, P10Q, P10R, P10S, P10T, P10V, P10W, P10Y, E39A, E39C, E39D, E39F, E39G, E39H, E39I, E39K, E39L, E39M, E39N, E39P, E39Q, E39R, E39S, E39T, E39V, E39W, E39Y, R44A, R44C, R44D, R44E, R44F, R44G, R44H, R441, R44K, R44L, R44N, R44P, R44Q, R44S, R44T, R44V, R44W, R44Y, T47A, T47C, T47D, T47E, T47F, T47G, T47H, T471, T47K, T47L, T47M, T47N, T47P, T47Q, T47R, T47S, T47V, T47W, T47Y, H92A, H92C, H92D, H92E, H92F, H92G, H921, H92K, H92L, H92M, H92N, H92P, H92Q, H92R, H92S, H92T, H92V, H92W, H92Y, P166A, P166C, P166D, P166E, P166F, P166G, P166H, P1661, P166K, P166L, P166M, P166N, P166Q, P166R, P166S, P166T, P166V, P166W, P166Y, A206C, A206D, A206E, A206F, A206G, A206H, A2061, A206K, A206L, A206M, A206N, A206P, A206Q, A206R, A206S, A206T, A206V, A206W, A206Y, R217A, R217C, R217D, R217E, R217F, R217G, R217H, R217I, R217K, R217L, R217M, R217N, R217P, R217Q, R217S, R217T, R217V, R217W, R217Y, D247A, D247C, D247E, D247F, D247G, D247H, D2471, D247K, D247L, D247M, D247N, D247P, D247Q, D247R, D247S, D247T, D247V, D247W, D247Y, G261A, G261C, G261D, G261E, G261F, G261H, G2611, G261K, G261L, G261M, G261N, G261P, G261Q, G261R, G261S, G261T, G261V, G261W, G261Y, A271C, A271D, A271E, A271F, A271G, A271H, A2711, A271K, A271L, A271M, A271N, A271P, A271Q, A271R, A271S, A271T, A271V, A271W, A271Y, K302A, K302C, K302D, K302E, K302F, K302G, K302H, K3021, K302L, K302M, K302N, K302P, K302Q, K302R, K302S, K302T, K302V, K302W, K302Y, D316A, D316C, D316E, D316F, D316G, D316H, D3161, D316K, D316L, D316M, D316N, D316P, D316Q, D316R, D316S, D316T, D316V, D316W, D316Y, I322A, I322C, I322D, 1322E, I322F, I322G, I322H, 1322K, I322L, I322M, I322N, I322P, I322Q, I322R, 1322S, I322T, I322V, 1322W, I322Y, P337A, P337C, P337D, P337E, P337F, P337G, P337H, P3371, P337K, P337L, P337M, P337N, P337Q, P337R, P337S, P337T, P337V, P337W, P337Y, A368C, A368D, A368E, A368F, A368G, A368H, A3681, A368K, A368L, A368M, A368N, A368P, A368Q, A368R, A368S, A368T, A368V, A368W, A368Y, T392A, T392C, T392D, T392E, T392F, T392G, T392H, T3921, T392K, T392L, T392M, T392N, T392P, T392Q, T392R, T392S, T392V, T392W, and T392Y, wherein the amino acid positions of said polypeptide sequence are numbered with reference to SEQ ID NO: 374.

[0015] The present invention also provides recombinant alpha galactosidase A wherein said comprises a polypeptide sequence having at least 85%, 86%, 87%, 88%, 89%, 90%, 91%, 92%, 93%, 94%, 95%, 96%, 97%, 98%, 99%, or more sequence identity to SEQ ID NO: 1022, or a functional fragment thereof, and wherein said recombinant alpha galactosidase A comprises at least one substitution or substitution set at one or more positions selected from 10, 10/392, 31, 31/39/44/166/302, 31/47, 31/283/284, 39, 39/44, 39/44/47, 39/44/47/261/283/284, 39/44/283, 39/44/339, 39/47/261, 39/92, 39/206, 39/284, 44, 44/284/302, 84, 84/92, 84/284/302/392, 84/316, 84/368/392, 92, 92/206/217, 92/206/275, 92/206/284, 92/206/302/368, 92/271, 92/271/277, 92/275/284, 92/283, 92/283/392, 92/284, 92/302, 92/316, 92/368, 155, 155/217, 155/368, 166, 166/283/284, 166/302, 206, 206/217, 206/334, 261, 261/283, 271, 271/368, 275, 283, 283/284, 283/392, 284, 302, 316, 334, 339, 368, 368/392, and 392, wherein the amino acid positions of said polypeptide sequence are numbered with reference to SEQ ID NO: 1022. In some embodiments, the recombinant alpha galactosidase A comprises a polypeptide sequence having at least 85%, 86%, 87%, 88%, 89%, 90%, 91%, 92%, 93%, 94%, 95%, 96%, 97%, 98%, 99%, or more sequence identity to SEQ ID NO: 1022, or a functional fragment thereof, and wherein said recombinant alpha galactosidase A comprises at least one substitution or substitution set at one or more positions selected from P10G, P10G/T392D, S31T, S31T/E39V/R44V/P166D/K302Y, S31T/T47R, S31T/K283L/D284A, E39L, E39L/H92V, E39L/A206E, E39L/D284S, E39V/R44V, E39V/R44V/T47R, E39V/R44V/T47R/G261S/K283L/D284A, E39V/R44V/K283T, E39V/R44V/A339N, E39V/T47R/G261S, R44V, R44V/D284E/K302Y, H84K, H84K/H92V, H84K/D284S/K302L/T392A, H84K/D316H, H84K/A368E/T392A, H92Q, H92T, H92T/A206E/R217N, H92T/A206E/K302T/A368E, H92T/A271K, H92T/A271K/K277R, H92T/K283P, H92T/K283V/T392W, H92T/D284M, H92T/K302L, H92T/A368E, H92V, H92V/A206E/D284S, H92V/A206Y/Q275A, H92V/Q275A/D284S, H92V/D284S, H92V/K302L, H92V/D316H, H155F, H155F/R2171, H155F/A368E, P166D, P166D/K283L/D284A, P166D/K302Y, A206E, A206E/R217N, A206I, A206Q, A206T/Y334C, A206Y, G261S, G261S/K283L, A271K, A271K/A368E, Q275A, K283L, K283P/T392W, K283T, K283T/D284E, D284E, D284M, D284S, K302L, K302Y, D316H, Y334C, A339N, A368E, A368E/T392W, T392A, T392D, and T392W, wherein the amino acid positions of said polypeptide sequence are numbered with reference to SEQ ID NO: 1022. In some embodiments, the recombinant alpha galactosidase A comprises a polypeptide sequence having at least 85%, 86%, 87%, 88%, 89%, 90%, 91%, 92%, 93%, 94%, 95%, 96%, 97%, 98%, 99%, or more sequence identity to SEQ ID NO: 1022, or a functional fragment thereof, and wherein said recombinant alpha galactosidase A comprises at least one substitution or substitution set at one or more positions selected from 10G, 10G/392D, 31T, 31T/39V/44V/166D/302Y, 31T/47R, 31T/283L/284A, 39L, 39L/92V, 39L/206E, 39L/284S, 39V/44V, 39V/44V/47R, 39V/44V/47R/261S/283L/284A, 39V/44V/283T, 39V/44V/339N, 39V/47R/261S, 44V, 44V/284E/302Y, 84K, 84K/92V, 84K/284S/302L/392A, 84K/316H, 84K/368E/392A, 92Q, 92T, 92T/206E/217N, 92T/206E/302T/368E, 92T/271K, 92T/271K/277R, 92T/283P, 92T/283V/392W, 92T/284M, 92T/302L, 92T/368E, 92V, 92V/206E/284S, 92V/206Y/275A, 92V/275A/284S, 92V/284S, 92V/302L, 92V/316H, 155F, 155F/217I, 155F/368E, 166D, 166D/283L/284A, 166D/302Y, 206E, 206E/217N, 2061, 206Q, 206T/334C, 206Y, 261S, 261S/283L, 271K, 271K/368E, 275A, 283L, 283P/392W, 283T, 283T/284E, 284E, 284M, 284S, 302L, 302Y, 316H, 334C, 339N, 368E, 368E/392W, 392A, 392D, and 392W, wherein the amino acid positions of said polypeptide sequence are numbered with reference to SEQ ID NO: 1022.

[0016] In some embodiments, the alpha galactosidase A of the present invention comprises at least one mutation in at least one position as provided in Table 2-1, 5-1, 6-1, 7-1, 8-1, 9-1, 11-1, 12-1, and/or 13-1, wherein the positions are numbered with reference to SEQ ID NO: 2 or another reference sequence, as indicted in the Tables. In some additional embodiments, the recombinant alpha galactosidase A is derived from a human alpha galactosidase A. In some further embodiments, the recombinant alpha galactosidase A comprises the polypeptide sequence of SEQ ID NO: 8, 58, 158, 372, 374, 704, and/or 1022.

[0017] In some embodiments, the recombinant alpha galactosidase A is more thermostable than the alpha galactosidase A of SEQ ID NO: 2, 8, 58, 158, 372, 374, 704, and/or 1022. In some additional embodiments, the recombinant alpha galactosidase A is more stable at pH 7 than the alpha galactosidase A of SEQ ID NO: 2, 8, 58, 158, 372, 374, 704, and/or 1022. In yet some additional embodiments, the recombinant alpha galactosidase A is more stable at pH 4 than the alpha galactosidase A of SEQ ID NO: 2, 8, 58, 158, 372, 374, 704, and/or 1022. In still some further embodiments, the recombinant alpha galactosidase A is more stable at pH 7 and more stable at pH 4 than the alpha galactosidase A of SEQ ID NO: 2, 8, 58, 158, 372, 374, 704, and/or 1022. In still additional embodiments, the recombinant alpha galactosidase A is more stable to exposure to serum than the alpha galactosidase A of SEQ ID NO: 2, 8, 58, 158, 372, 374, 704, and/or 1022. In some further embodiments, the recombinant alpha galactosidase A is more lysosomally stable than the alpha galactosidase A of SEQ ID NO: 2, 8, 58, 158, 372, 374, 704, and/or 1022. In yet some additional embodiments, the recombinant alpha galactosidase A is more readily taken up by cells than the alpha galactosidase A of SEQ ID NO: 2, 8, 58, 158, 372, 374, 704, and/or 1022. In some further embodiments, the recombinant alpha galactosidase A depletes more globotriaosylceramide from cells than the alpha galactosidase A of SEQ ID NO: 2, 8, 58, 158, 372, 374, 704, and/or 1022. In yet some additional embodiments, the recombinant alpha galactosidase A exhibits improved uptake into cells, as compared to SEQ ID NO: 2, 8, 58, 158, 372, 374, 704, and/or 1022. In some further embodiments, the recombinant alpha galactosidase A is less immunogenic than the alpha galactosidase A of SEQ ID NO: 2, 8, 58, 158, 372, 374, 704, and/or 1022. In some further embodiments, the recombinant alpha galactosidase A exhibits at least one improved property selected from: i) enhanced catalytic activity; ii) increased tolerance to pH 7; iii) increased tolerance to pH 4; iv) increased tolerance to serum; v) improved uptake into cells; vi) reduced immunogenicity; or vii) increased depletion of globotriaosylceramide from cells; or a combination of any of i), ii), iii), iv), v), vi) or vii), as compared to a reference sequence. In some embodiments, the reference sequence is SEQ ID NO: 2, 8, 58, 158, 372, 374, 704, and/or 1022. In some further embodiments, the recombinant alpha galactosidase A is purified.

[0018] The present invention also provides recombinant polynucleotide sequences encoding at least one recombinant alpha galactosidase A as provided herein (e.g., in Table 2-1, 5-1, 6-1, 7-1, 8-1, 9-1, 11-1, 12-1, and/or 13-1). In some embodiments, the polynucleotide sequence is selected from DNA, RNA, and mRNA. In some embodiments, the recombinant polynucleotide sequence is codon-optimized.

[0019] The present invention also provides expression vectors comprising the recombinant polynucleotide sequence encoding at least one recombinant alpha galactosidase A as provided herein (e.g., Table 2-1, 5-1, 6-1, 7-1, 8-1, 9-1, 11-1, 12-1, and/or 13-1). In some embodiments, the recombinant polynucleotide sequence is operably linked to a control sequence. In some additional embodiments, the control sequence is a promoter. In some further embodiments, the promoter is a heterologous promoter. In some embodiments, the expression vector further comprises a signal sequence, as provided herein.

[0020] The present invention also provides host cells comprising at least one expression vector as provided herein. In some embodiments, the host cell comprises an expression vector comprising the recombinant polynucleotide sequence encoding at least one recombinant alpha galactosidase A as provided herein (e.g., Table 2-1, 5-1, 6-1, 7-1, 8-1, 9-1, 11-1, 12-1, and/or 13-1). In some embodiments, the host cell is selected from eukaryotes and prokaryotes. In some embodiments, the host cell is eukaryotic. In some additional embodiments, the host cell is a mammalian cell.

[0021] The present invention also provides methods of producing an alpha galactosidase A variant, comprising culturing a host cell provided herein, under conditions that the alpha galactosidase A encoded by the recombinant polynucleotide is produced. In some embodiments, the methods further comprise the step of recovering alpha galactosidase A. In some further embodiments, the methods further comprise the step of purifying the alpha galactosidase A. The present invention also provides compositions comprising at least one recombinant alpha galactosidase A as provided herein (e.g., Table 2-1, 5-1, 6-1, 7-1, 8-1, 9-1, 11-1, 12-1, and/or 13-1). In some embodiments, the present invention provides pharmaceutical compositions. In some embodiments, the present invention provides pharmaceutical compositions comprising at least one recombinant polynucleotide provided herein. In some additional embodiments, the present invention provides pharmaceutical compositions for the treatment of Fabry disease, comprising an enzyme composition provided herein. In some embodiments, the pharmaceutical compositions, further comprise a pharmaceutically acceptable carrier and/or excipient. In some additional embodiments, the pharmaceutical composition is suitable for parenteral injection or infusion to a human.

[0022] The present invention also provides methods for treating and/or preventing the symptoms of Fabry disease in a subject, comprising providing a subject having Fabry disease, and providing at least one pharmaceutical composition compositions comprising at least one recombinant alpha galactosidase A as provided herein (e.g., Table 2-1, 5-1, 6-1, 7-1, 8-1, 9-1, 11-1, 12-1, and/or 13-1), and administering the pharmaceutical composition to the subject. In some embodiments, the symptoms of Fabry disease are ameliorated in the subject. In some additional embodiments, the subject to whom the pharmaceutical composition of the present invention has been administered is able to eat a diet that is less restricted in its fat content than diets required by subjects exhibiting the symptoms of Fabry disease. In some embodiments, the subject is an infant or child, while in some alternative embodiments, the subject is an adult or young adult.

[0023] The present invention also provides for the use of the compositions provided herein.

### BRIEF DESCRIPTION OF THE DRAWINGS

[0024] FIG. 1 provides a graph showing the relative activity of GLA variants after incubation for 1 hour at temperatures 30-50° C.

[0025] FIG. 2 provides a graph showing the relative activity of GLA variants after challenge at 37° C. for 0-24 hours with human serum.

[0026] FIG. 3 provides a graph showing the relative activity of GLA variants after challenge at 37° C. for 0-24 hours with human lysosomal extract.

[0027] FIG. 4 provides a graph showing the cellular uptake of different purified GLA variants, expressed as relative activity compared to wild type after 4 hours incubation at 37° C. with cultured Fabry patient fibroblasts.

[0028] FIG. 5 provides a graph showing the activity of GLA variants in the heart of the Fabry mice compared to SEQ ID NO: 2 at 1, 2, and 4 weeks post-administration.

[0029] FIG. 6 provides a graph showing residual Gb₃ in the heart of Fabry mice treated with GLA variants at 1 and 2 weeks post-administration.

[0030] FIG. 7 provides a graph showing the residual activity of GLA variants after a challenge with human serum for 0-24 hrs.

[0031] FIG. 8 provides a graph showing the cellular uptake of purified GLA variants in cultured Fabry patient fibroblasts after 4 hours incubation and 3 day washout at 37° C.

[0032] FIG. 9 provides a graph showing in vivo enzyme activity in the heart in the Fabry mouse model, 7 days after the last treatment.

[0033] FIG. 10 provides a graph showing in vivo enzyme activity in the kidney in the Fabry mouse model, 7 days after the last treatment.

[0034] FIG. 11 provides a graph showing Gb3 degradation in heart tissue.

[0035] FIG. 12 provides a graph showing Gb3 degradation in kidney tissue.

[0036] FIG. 13 provides a graph showing lyso-Gb3 degradation in heart tissue.

[0037] FIG. 14 provides a graph showing lyso-Gb3 degradation in kidney tissue.

### DESCRIPTION OF THE INVENTION

[0038] The present invention provides engineered human alpha-galactosidase polypeptides and compositions thereof. The engineered human alpha-galactosidase polypeptides have been optimized to provide improved thermostability, serum stability, improved cellular uptake, and stability under both acidic (pH<4) and basic (pH>7) conditions, reduced immunogenicity, and improved globotriaosylceramide clearance from cells. The invention also relates to the use of the compositions comprising the engineered human alpha-galactosidase polypeptides for therapeutic purposes. In some embodiments, the engineered human alpha-galactosidase polypeptides have been optimized to provide improved cellular uptake while maintaining stability. The invention also relates to the use of the compositions comprising the engineered human alpha-galactosidase polypeptides for therapeutic purposes.

[0039] In some cases, enzyme replacement therapy for treatment of Fabry disease (e.g., FABRAZYME® agalsidase beta; Genzyme) is considered for eligible individuals. Currently used enzyme replacements therapies are recombinantly expressed forms of the wild-type human GLA. It is known that intravenously administered GLA circulates, is taken into cells via receptor-mediated endocytosis, primarily mannose 6-phosphate receptors (M6PR), and travels to the endosomes/lysosomes of target organs, where it clears accumulated of Gb3. These drugs do not completely relieve patient symptoms, as neuropathic pain and transient ischemic attacks continue to occur at reduced rates. In addition, the uptake of GLA by most target organs is poor in comparison to the highly vascularized and M6PR-rich liver, and the enzyme is unstable at the pH of blood and lysosomes. Thus, issues remain with available treatments. In addition, patients may develop an immune response (IgG and IgE antibodies targeting the administered drug), and suffer severe allergic (anaphylactic) reactions, severe infusion reactions, and even death. The present invention is intended to provide more stable and efficacious enzymes suitable for treatment of Fabry disease, yet with reduced side effects and improved outcomes, as compared to currently available treatments. Indeed, the present invention is intended to provide recombinant GLA enzymes that have increased stability in blood (pH 7.4), which the enzyme encounters upon introduction into the bloodstream. In addition, the enzyme has increased stability at the pH of the lysosome (pH 4.3), the location where the enzyme is active during therapy. Thus, directed evolution of recombinantly expressed human GLA in human HEK293T cells, employing high throughput screening of diverse enzyme variant libraries, was used to provide novel GLA variants with maintained stability properties, improved globotriaosylceramide clearance, and cellular uptake. In some embodiments, the GLA variants exhibit reduced immunogenicity.

### Abbreviations and Definitions

[0040] Unless defined otherwise, all technical and scientific terms used herein generally have the same meaning as commonly understood by one of ordinary skill in the art to which this invention pertains. Generally, the nomenclature used herein and the laboratory procedures of cell culture, molecular genetics, microbiology, biochemistry, organic chemistry, analytical chemistry and nucleic acid chemistry described below are those well-known and commonly employed in the art. Such techniques are well-known and described in numerous texts and reference works well known to those of skill in the art. Standard techniques, or modifications thereof, are used for chemical syntheses and chemical analyses. All patents, patent applications, articles and publications mentioned herein, both supra and infra, are hereby expressly incorporated herein by reference.

[0041] Although any suitable methods and materials similar or equivalent to those described herein find use in the practice of the present invention, some methods and materials are described herein. It is to be understood that this invention is not limited to the particular methodology, protocols, and reagents described, as these may vary, depending upon the context they are used by those of skill in the art. Accordingly, the terms defined immediately below are more fully described by reference to the application as a whole. All patents, patent applications, articles and publications mentioned herein, both supra and infra, are hereby expressly incorporated herein by reference.

[0042] Also, as used herein, the singular “a”, “an,” and “the” include the plural references, unless the context clearly indicates otherwise.

[0043] Numeric ranges are inclusive of the numbers defining the range. Thus, every numerical range disclosed herein is intended to encompass every narrower numerical range that falls within such broader numerical range, as if such narrower numerical ranges were all expressly written herein. It is also intended that every maximum (or minimum) numerical limitation disclosed herein includes every lower (or higher) numerical limitation, as if such lower (or higher) numerical limitations were expressly written herein.

[0044] The term “about” means an acceptable error for a particular value. In some instances, “about” means within 0.05%, 0.5%, 1.0%, or 2.0%, of a given value range. In some instances, “about” means within 1, 2, 3, or 4 standard deviations of a given value.

[0045] Furthermore, the headings provided herein are not limitations of the various aspects or embodiments of the invention which can be had by reference to the application as a whole. Accordingly, the terms defined immediately below are more fully defined by reference to the application as a whole. Nonetheless, in order to facilitate understanding of the invention, a number of terms are defined below.

[0046] Unless otherwise indicated, nucleic acids are written left to right in 5′ to 3′ orientation; amino acid sequences are written left to right in amino to carboxy orientation, respectively.

[0047] As used herein, the term “comprising” and its cognates are used in their inclusive sense (i.e., equivalent to the term “including” and its corresponding cognates).

[0048] As used herein, the “EC” number refers to the Enzyme Nomenclature of the Nomenclature Committee of the International Union of Biochemistry and Molecular Biology (NC-IUBMB). The IUBMB biochemical classification is a numerical classification system for enzymes based on the chemical reactions they catalyze.

[0049] As used herein, “ATCC” refers to the American Type Culture Collection whose biorepository collection includes genes and strains.

[0050] As used herein, “NCBI” refers to National Center for Biological Information and the sequence databases provided therein.

[0051] “Protein,” “polypeptide,” and “peptide” are used interchangeably herein to denote a polymer of at least two amino acids covalently linked by an amide bond, regardless of length or post-translational modification (e.g., glycosylation or phosphorylation).

[0052] “Amino acids” are referred to herein by either their commonly known three-letter symbols or by the one-letter symbols recommended by IUPAC-IUB Biochemical Nomenclature Commission. Nucleotides, likewise, may be referred to by their commonly accepted single letter codes. The abbreviations used for the genetically encoded amino acids are conventional and are as follows: alanine (Ala or A), arginine (Arg or R), asparagine (Asn or N), aspartate (Asp or D), cysteine (Cys or C), glutamate (Glu or E), glutamine (Gln or Q), histidine (His or H), isoleucine (Ile or I), leucine (Leu or L), lysine (Lys or K), methionine (Met or M), phenylalanine (Phe or F), proline (Pro or P), serine (Ser or S), threonine (Thr or T), tryptophan (Trp or W), tyrosine (Tyr or Y), and valine (Val or V). When the three-letter abbreviations are used, unless specifically preceded by an “L” or a “D” or clear from the context in which the abbreviation is used, the amino acid may be in either the L- or D-configuration about α-carbon (C_{α}). For example, whereas “Ala” designates alanine without specifying the configuration about the α-carbon, “D-Ala” and “L-Ala” designate D-alanine and L-alanine, respectively. When polypeptide sequences are presented as a string of one-letter or three-letter abbreviations (or mixtures thereof), the sequences are presented in the amino (N) to carboxy (C) direction in accordance with common convention.

[0053] The abbreviations used for the genetically encoding nucleosides are conventional and are as follows: adenosine (A); guanosine (G); cytidine (C); thymidine (T); and uridine (U). Unless specifically delineated, the abbreviated nucleosides may be either ribonucleosides or 2′-deoxyribonucleosides. The nucleosides may be specified as being either ribonucleosides or 2′-deoxyribonucleosides on an individual basis or on an aggregate basis. When nucleic acid sequences are presented as a string of one-letter abbreviations, the sequences are presented in the 5′ to 3′ direction in accordance with common convention, and the phosphates are not indicated.

[0054] The terms “engineered,” “recombinant,” “non-naturally occurring,” and “variant,” when used with reference to a cell, a polynucleotide or a polypeptide refers to a material or a material corresponding to the natural or native form of the material that has been modified in a manner that would not otherwise exist in nature or is identical thereto but produced or derived from synthetic materials and/or by manipulation using recombinant techniques.

[0055] As used herein, “UTR” refers to untranslated regions of an mRNA polynucleotide. In some embodiments, a “5′ untranslated region” or “5′UTR” is referred to as a “leader sequence” or “leader RNA.” This mRNA region is directly upstream from the initiation codon. In some embodiments, a “3′ untranslated region” or “3′UTR” is an mRNA region directly downstream from the stop codon. In various organisms (e.g., prokaryotes, eukaryotes, and viruses), both of these regions are important for translation regulation and intracellular trafficking.

[0056] As used herein, “wild-type,” “WT,” and “naturally-occurring” refer to the form found in nature. For example, a wild-type polypeptide or polynucleotide sequence is a sequence present in an organism that can be isolated from a source in nature and which has not been intentionally modified by human manipulation.

[0057] As used herein, “coding sequence” refers to that part of a nucleic acid (e.g., a gene) that encodes an amino acid sequence of a protein.

[0058] The term “percent (%) sequence identity” is used herein to refer to comparisons among polynucleotides and polypeptides, and are determined by comparing two optimally aligned sequences over a comparison window, wherein the portion of the polynucleotide or polypeptide sequence in the comparison window may comprise additions or deletions (i.e., gaps) as compared to the reference sequence for optimal alignment of the two sequences. The percentage may be calculated by determining the number of positions at which the identical nucleic acid base or amino acid residue occurs in both sequences to yield the number of matched positions, dividing the number of matched positions by the total number of positions in the window of comparison and multiplying the result by 100 to yield the percentage of sequence identity. Alternatively, the percentage may be calculated by determining the number of positions at which either the identical nucleic acid base or amino acid residue occurs in both sequences or a nucleic acid base or amino acid residue is aligned with a gap to yield the number of matched positions, dividing the number of matched positions by the total number of positions in the window of comparison and multiplying the result by 100 to yield the percentage of sequence identity. Those of skill in the art appreciate that there are many established algorithms available to align two sequences. Optimal alignment of sequences for comparison can be conducted, e.g., by the local homology algorithm of Smith and Waterman (Smith and Waterman, Adv. Appl. Math., 2:482 [1981]), by the homology alignment algorithm of Needleman and Wunsch (Needleman and Wunsch, J. Mol. Biol., 48:443 [1970), by the search for similarity method of Pearson and Lipman (Pearson and Lipman, Proc. Natl. Acad. Sci. USA 85:2444 [1988]), by computerized implementations of these algorithms (e.g., GAP, BESTFIT, FASTA, and TFASTA in the GCG Wisconsin Software Package), or by visual inspection, as known in the art. Examples of algorithms that are suitable for determining percent sequence identity and sequence similarity include, but are not limited to the BLAST and BLAST 2.0 algorithms, which are described by Altschul et al. (See, Altschul et al., J. Mol. Biol., 215: 403-410 [1990]; and Altschul et al., 1977, Nucleic Acids Res., 3389-3402 [1977], respectively). Software for performing BLAST analyses is publicly available through the National Center for Biotechnology Information website. This algorithm involves first identifying high scoring sequence pairs (HSPs) by identifying short words of length W in the query sequence, which either match or satisfy some positive-valued threshold score T when aligned with a word of the same length in a database sequence. T is referred to as, the neighborhood word score threshold (See, Altschul et al., supra). These initial neighborhood word hits act as seeds for initiating searches to find longer HSPs containing them. The word hits are then extended in both directions along each sequence for as far as the cumulative alignment score can be increased. Cumulative scores are calculated using, for nucleotide sequences, the parameters M (reward score for a pair of matching residues; always >0) and N (penalty score for mismatching residues; always <0). For amino acid sequences, a scoring matrix is used to calculate the cumulative score. Extension of the word hits in each direction are halted when: the cumulative alignment score falls off by the quantity X from its maximum achieved value; the cumulative score goes to zero or below, due to the accumulation of one or more negative-scoring residue alignments; or the end of either sequence is reached. The BLAST algorithm parameters W, T, and X determine the sensitivity and speed of the alignment. The BLASTN program (for nucleotide sequences) uses as defaults a wordlength (W) of 11, an expectation (E) of 10, M=5, N=−4, and a comparison of both strands. For amino acid sequences, the BLASTP program uses as defaults a wordlength (W) of 3, an expectation (E) of 10, and the BLOSUM62 scoring matrix (See, Henikoff and Henikoff, Proc. Natl. Acad. Sci. USA 89:10915 [1989]). Exemplary determination of sequence alignment and % sequence identity can employ the BESTFIT or GAP programs in the GCG Wisconsin Software package (Accelrys, Madison Wis.), using default parameters provided.

[0059] As used herein, “reference sequence” refers to a defined sequence used as a basis for a sequence comparison. A reference sequence may be a subset of a larger sequence, for example, a segment of a full-length gene or polypeptide sequence. Generally, a reference sequence is at least 20 nucleotide or amino acid residues in length, at least 25 residues in length, at least 50 residues in length, at least 100 residues in length or the full length of the nucleic acid or polypeptide. Since two polynucleotides or polypeptides may each (1) comprise a sequence (i.e., a portion of the complete sequence) that is similar between the two sequences, and (2) may further comprise a sequence that is divergent between the two sequences, sequence comparisons between two (or more) polynucleotides or polypeptide are typically performed by comparing sequences of the two polynucleotides or polypeptides over a “comparison window” to identify and compare local regions of sequence similarity. In some embodiments, a “reference sequence” can be based on a primary amino acid sequence, where the reference sequence is a sequence that can have one or more changes in the primary sequence. “Comparison window” refers to a conceptual segment of at least about 20 contiguous nucleotide positions or amino acids residues wherein a sequence may be compared to a reference sequence of at least 20 contiguous nucleotides or amino acids and wherein the portion of the sequence in the comparison window may comprise additions or deletions (i.e., gaps) of 20 percent or less as compared to the reference sequence (which does not comprise additions or deletions) for optimal alignment of the two sequences. The comparison window can be longer than 20 contiguous residues, and includes, optionally 30, 40, 50, 100, or longer windows.

[0060] “Corresponding to”, “reference to” and “relative to” when used in the context of the numbering of a given amino acid or polynucleotide sequence refers to the numbering of the residues of a specified reference sequence when the given amino acid or polynucleotide sequence is compared to the reference sequence. In other words, the residue number or residue position of a given polymer is designated with respect to the reference sequence rather than by the actual numerical position of the residue within the given amino acid or polynucleotide sequence. For example, a given amino acid sequence, such as that of an engineered GLA, can be aligned to a reference sequence by introducing gaps to optimize residue matches between the two sequences. In these cases, although the gaps are present, the numbering of the residue in the given amino acid or polynucleotide sequence is made with respect to the reference sequence to which it has been aligned.

[0061] As used herein, “amino acid difference” and “residue difference” refer to a difference in the amino acid residue at a position of a polypeptide sequence relative to the amino acid residue at a corresponding position in a reference sequence. The positions of amino acid differences generally are referred to herein as “Xn,” where n refers to the corresponding position in the reference sequence upon which the residue difference is based. For example, a “residue difference at position X44 as compared to SEQ ID NO: 8” refers to a difference of the amino acid residue at the polypeptide position corresponding to position 44 of SEQ ID NO: 8. Thus, if the reference polypeptide of SEQ ID NO: 8 has a arginine at position 44, then a “residue difference at position X44 as compared to SEQ ID NO: 8” an amino acid substitution of any residue other than arginine at the position of the polypeptide corresponding to position 44 of SEQ ID NO: 8. In most instances herein, the specific amino acid residue difference at a position is indicated as “XnY” where “Xn” specified the corresponding position as described above, and “Y” is the single letter identifier of the amino acid found in the engineered polypeptide (i.e., the different residue than in the reference polypeptide). In some instances (e.g., as shown in in Tables 2-1, 5-1, 6-1, 7-1, 8-1, 9-1, 11-1, 12-1, and 13-1), the present disclosure also provides specific amino acid differences denoted by the conventional notation “AnB”, where A is the single letter identifier of the residue in the reference sequence, “n” is the number of the residue position in the reference sequence, and B is the single letter identifier of the residue substitution in the sequence of the engineered polypeptide. In some instances, a polypeptide of the present disclosure can include one or more amino acid residue differences relative to a reference sequence, which is indicated by a list of the specified positions where residue differences are present relative to the reference sequence. In some embodiments, where more than one amino acid can be used in a specific residue position of a polypeptide, the various amino acid residues that can be used are separated by a “/” (e.g., X247D/X247N or X247D/N). In some embodiments, the enzyme variants comprise more than one substitution. These substitutions are separated by a slash for ease in reading (e.g., D24S/D202N). The present application includes engineered polypeptide sequences comprising one or more amino acid differences that include either/or both conservative and non-conservative amino acid substitutions.

[0062] As used herein, “mutation” refers to substitutions, insertions, deletions, and other modifications of polypeptide and polynucleotide sequences. It is not intended that the present invention be limited to any specific type of mutation(s).

[0063] “Conservative amino acid substitution” refers to a substitution of a residue with a different residue having a similar side chain, and thus typically involves substitution of the amino acid in the polypeptide with amino acids within the same or similar defined class of amino acids. By way of example and not limitation, an amino acid with an aliphatic side chain may be substituted with another aliphatic amino acid (e.g., alanine, valine, leucine, and isoleucine); an amino acid with hydroxyl side chain is substituted with another amino acid with a hydroxyl side chain (e.g., serine and threonine); an amino acids having aromatic side chains is substituted with another amino acid having an aromatic side chain (e.g., phenylalanine, tyrosine, tryptophan, and histidine); an amino acid with a basic side chain is substituted with another amino acid with a basis side chain (e.g., lysine and arginine); an amino acid with an acidic side chain is substituted with another amino acid with an acidic side chain (e.g., aspartic acid or glutamic acid); and/or a hydrophobic or hydrophilic amino acid is replaced with another hydrophobic or hydrophilic amino acid, respectively.

[0064] “Non-conservative substitution” refers to substitution of an amino acid in the polypeptide with an amino acid with significantly differing side chain properties. Non-conservative substitutions may use amino acids between, rather than within, the defined groups and affects (a) the structure of the peptide backbone in the area of the substitution (e.g., proline for glycine) (b) the charge or hydrophobicity, or (c) the bulk of the side chain. By way of example and not limitation, an exemplary non-conservative substitution can be an acidic amino acid substituted with a basic or aliphatic amino acid; an aromatic amino acid substituted with a small amino acid; and a hydrophilic amino acid substituted with a hydrophobic amino acid.

[0065] As used herein, “deletion” refers to modification to the polypeptide by removal of one or more amino acids from the reference polypeptide. Deletions can comprise removal of 1 or more amino acids, 2 or more amino acids, 5 or more amino acids, 10 or more amino acids, 15 or more amino acids, or 20 or more amino acids, up to 10% of the total number of amino acids, or up to 20% of the total number of amino acids making up the reference enzyme while retaining enzymatic activity and/or retaining the improved properties of an engineered enzyme. Deletions can be directed to the internal portions and/or terminal portions of the polypeptide. In various embodiments, the deletion can comprise a continuous segment or can be discontinuous.

[0066] As used herein, “insertion” refers to modification to the polypeptide by addition of one or more amino acids from the reference polypeptide. Insertions can be in the internal portions of the polypeptide, or to the carboxy or amino terminus. Insertions as used herein include fusion proteins as is known in the art. The insertion can be a contiguous segment of amino acids or separated by one or more of the amino acids in the naturally occurring polypeptide.

[0067] A “functional fragment” and “biologically active fragment” are used interchangeably herein to refer to a polypeptide that has an amino-terminal and/or carboxy-terminal deletion(s) and/or internal deletions, but where the remaining amino acid sequence is identical to the corresponding positions in the sequence to which it is being compared (e.g., a full-length engineered GLA of the present invention) and that retains substantially all of the activity of the full-length polypeptide.

[0068] As used herein, “isolated polypeptide” refers to a polypeptide which is substantially separated from other contaminants that naturally accompany it (e.g., protein, lipids, and polynucleotides). The term embraces polypeptides which have been removed or purified from their naturally-occurring environment or expression system (e.g., host cell or in vitro synthesis). The recombinant GLA polypeptides may be present within a cell, present in the cellular medium, or prepared in various forms, such as lysates or isolated preparations. As such, in some embodiments, the recombinant GLA polypeptides can be an isolated polypeptide.

[0069] As used herein, “substantially pure polypeptide” refers to a composition in which the polypeptide species is the predominant species present (i.e., on a molar or weight basis it is more abundant than any other individual macromolecular species in the composition), and is generally a substantially purified composition when the object species comprises at least about 50 percent of the macromolecular species present by mole or % weight. Generally, a substantially pure GLA composition comprises about 60% or more, about 70% or more, about 80% or more, about 90% or more, about 95% or more, and about 98% or more of all macromolecular species by mole or % weight present in the composition. In some embodiments, the object species is purified to essential homogeneity (i.e., contaminant species cannot be detected in the composition by conventional detection methods) wherein the composition consists essentially of a single macromolecular species. Solvent species, small molecules (<500 Daltons), and elemental ion species are not considered macromolecular species. In some embodiments, the isolated recombinant GLA polypeptides are substantially pure polypeptide compositions.

[0070] As used herein, “improved enzyme property” refers to an engineered GLA polypeptide that exhibits an improvement in any enzyme property as compared to a reference GLA polypeptide and/or as a wild-type GLA polypeptide or another engineered GLA polypeptide. Improved properties include, but are not limited to such properties as increased gene expression, increased protein production, increased thermoactivity, increased thermostability, increased activity at various pH levels, increased stability, increased enzymatic activity, increased substrate specificity or affinity, increased specific activity, increased resistance to substrate and/or product inhibition, increased chemical stability, improved chemoselectivity, improved solvent stability, increased tolerance to acidic, neutral, or basic pH, increased tolerance to proteolytic activity (i.e., reduced sensitivity to proteolysis), reduced aggregation, increased solubility, reduced immunogenicity, improved post-translational modification (e.g., glycosylation), altered temperature profile, increased cellular uptake, increased lysosomal stability, increased ability to deplete cells of Gb3, increased secretion from GLA producing cells, etc.

[0071] As used herein, “increased enzymatic activity” and “enhanced catalytic activity” refer to an improved property of the engineered GLA polypeptides, which can be represented by an increase in specific activity (e.g., product produced/time/weight protein) or an increase in percent conversion of the substrate to the product (e.g., percent conversion of starting amount of substrate to product in a specified time period using a specified amount of GLA) as compared to the reference GLA enzyme.

[0072] Exemplary methods to determine enzyme activity are provided in the Examples. Any property relating to enzyme activity may be affected, including the classical enzyme properties of Kₘ, Vₘₐₓ or k_{cat}, changes of which can lead to increased enzymatic activity. Improvements in enzyme activity can be from about 1.1 fold the enzymatic activity of the corresponding wild-type enzyme, to as much as 2-fold, 5-fold, 10-fold, 20-fold, 25-fold, 50-fold, 75-fold, 100-fold, 150-fold, 200-fold or more enzymatic activity than the naturally occurring GLA or another engineered GLA from which the GLA polypeptides were derived.

[0073] In some embodiments, the engineered GLA polypeptides have a k_{cat} of at least 0.1/sec, at least 0.5/sec, at least 1.0/sec, at least 5.0/sec, at least 10.0/sec and in some preferred embodiments greater than 10.0/sec. In some embodiments, the Kₘ is in the range of about 1 μM to about 5 mM; in the range of about 5 μM to about 2 mM; in the range of about 10 μM to about 2 mM; or in the range of about 10 μM to about 1 mM. In some specific embodiments, the engineered GLA enzyme exhibits improved enzymatic activity after exposure to certain conditions in the range of 1.5 to 10 fold, 1.5 to 25 fold, 1.5 to 50 fold, 1.5 to 100 fold or greater than that of a reference GLA enzyme (e.g., a wild-type GLA or any other reference GLA, such as SEQ ID NO: 8). GLA activity can be measured by any suitable method known in the art (e.g., standard assays, such as monitoring changes in spectrophotometric properties of reactants or products). In some embodiments, the amount of product produced can be measured by High-Performance Liquid Chromatography (HPLC) separation combined with UV absorbance or fluorescent detection directly or following o-phthaldialdehyde (OPA) derivatization. In some embodiments, the amount of product produced can be measured by monitoring fluorescence (Ex. 355 nm, Em. 460 nm) after hydrolysis of a 4-methylumbelliferyl-alpha-D-galactopyranoside (4-MUGal) molecule. Comparisons of enzyme activities are made using a defined preparation of enzyme, a defined assay under a set condition, and one or more defined substrates, as further described in detail herein. Generally, when lysates are compared, the numbers of cells and the amount of protein assayed are determined as well as use of identical expression systems and identical host cells to minimize variations in amount of enzyme produced by the host cells and present in the lysates.

[0074] As used herein, the term “improved tolerance to acidic pH” means that a recombinant GLA according to the invention will have increased stability (higher retained activity at about pH 4.8 after exposure to acidic pH for a specified period of time (1 hour, up to 24 hours)) as compared to a reference GLA or another enzyme.

[0075] As used herein, the term “improved cellular uptake” means that a recombinant GLA provided herein exhibits increased endocytosis into cells, as compared to a reference GLA (including wild-type GLA) or another enzyme. In some embodiments, the cells are cultured Fabry patient fibroblasts (higher retained intracellular activity after incubation with cultured cells over a specified period of time, as compared to a reference GLA or another enzyme). In some additional embodiments, the recombinant GLA provided herein exhibits greater retained intracellular activity with cultured cells over a specific period of time as compared to a reference GLA (including wild-type GLA) or another enzyme. In some additional embodiments, the time period is about 4 hours, while in some other embodiments, the time period is less than 4 hours (e.g., 1, 2, or 3 hours), and in some alternative embodiments, the time period is more than 4 hours (e.g., 5, 6, 7, 8, or more hours).

[0076] “Physiological pH” as used herein means the pH range generally found in a subject's (e.g., human) blood.

[0077] The term “basic pH” (e.g., used with reference to improved stability to basic pH conditions or increased tolerance to basic pH) means a pH range of about 7 to 11.

[0078] The term “acidic pH” (e.g., used with reference to improved stability to acidic pH conditions or increased tolerance to acidic pH) means a pH range of about 1.5 to 4.5.

[0079] As used herein, “conversion” refers to the enzymatic conversion (or biotransformation) of a substrate(s) to the corresponding product(s). “Percent conversion” refers to the percent of the substrate that is converted to the product within a period of time under specified conditions. Thus, the “enzymatic activity” or “activity” of a GLA polypeptide can be expressed as “percent conversion” of the substrate to the product in a specific period of time.

[0080] As used herein, “hybridization stringency” relates to hybridization conditions, such as washing conditions, in the hybridization of nucleic acids. Generally, hybridization reactions are performed under conditions of lower stringency, followed by washes of varying but higher stringency. The term “moderately stringent hybridization” refers to conditions that permit target-DNA to bind a complementary nucleic acid that has about 60% identity, preferably about 75% identity, about 85% identity to the target DNA, with greater than about 90% identity to target-polynucleotide. Exemplary moderately stringent conditions are conditions equivalent to hybridization in 50% formamide, 5× Denhart's solution, 5×SSPE, 0.2% SDS at 42° C., followed by washing in 0.2×SSPE, 0.2% SDS, at 42° C. “High stringency hybridization” refers generally to conditions that are about 10° C. or less from the thermal melting temperature Tₘ as determined under the solution condition for a defined polynucleotide sequence. In some embodiments, a high stringency condition refers to conditions that permit hybridization of only those nucleic acid sequences that form stable hybrids in 0.018M NaCl at 65° C. (i.e., if a hybrid is not stable in 0.018M NaCl at 65° C., it will not be stable under high stringency conditions, as contemplated herein). High stringency conditions can be provided, for example, by hybridization in conditions equivalent to 50% formamide, 5× Denhart's solution, 5×SSPE, 0.2% SDS at 42° C., followed by washing in 0.1×SSPE, and 0.1% SDS at 65° C. Another high stringency condition is hybridizing in conditions equivalent to hybridizing in 5×SSC containing 0.1% (w:v) SDS at 65° C. and washing in 0.1×SSC containing 0.1% SDS at 65° C. Other high stringency hybridization conditions, as well as moderately stringent conditions, are described in the references cited above.

[0081] As used herein, “codon optimized” refers to changes in the codons of the polynucleotide encoding a protein such that the encoded protein is more efficiently expressed in the organism and/or cells of interest. Although the genetic code is degenerate in that most amino acids are represented by several codons, called “synonyms” or “synonymous” codons, it is well known that codon usage by particular organisms is nonrandom and biased towards particular codon triplets. This codon usage bias may be higher in reference to a given gene, genes of common function or ancestral origin, highly expressed proteins versus low copy number proteins, and the aggregate protein coding regions of an organism's genome. In some embodiments, the polynucleotides encoding the GLA enzymes may be codon optimized for optimal production from the host organism(s) and/or cell type(s) selected for expression accounting for GC content, cryptic splice sites, transcription termination signals, motifs that may affect RNA stability, and nucleic acid secondary structures, as well as any other factors of interest.

[0082] As used herein, “control sequence” refers to include all components, which are necessary or advantageous for the expression of a polynucleotide and/or polypeptide of the present application. Each control sequence may be native or foreign to the nucleic acid sequence encoding the polypeptide. Such control sequences include, but are not limited to, a leader, polyadenylation sequence, propeptide sequence, promoter sequence, signal peptide sequence, initiation sequence and transcription terminator. At a minimum, the control sequences include a promoter, and transcriptional and translational stop signals. The control sequences may be provided with linkers for the purpose of introducing specific restriction sites facilitating ligation of the control sequences with the coding region of the nucleic acid sequence encoding a polypeptide.

[0083] As used herein, “operably linked” refers to a configuration in which a control sequence is appropriately placed (i.e., in a functional relationship) at a position relative to a polynucleotide of interest such that the control sequence directs or regulates the expression of the polynucleotide and/or polypeptide of interest.

[0084] As used herein, “promoter sequence” refers to a nucleic acid sequence that is recognized by a host cell for expression of a polynucleotide of interest, such as a coding sequence. The promoter sequence contains transcriptional control sequences, which mediate the expression of a polynucleotide of interest. The promoter may be any nucleic acid sequence which shows transcriptional activity in the host cell of choice including mutant, truncated, and hybrid promoters, and may be obtained from genes encoding extracellular or intracellular polypeptides either homologous or heterologous to the host cell.

[0085] As used herein, “suitable reaction conditions” refers to those conditions in the enzymatic conversion reaction solution (e.g., ranges of enzyme loading, temperature, pH, buffers, co-solvents, etc.) under which a GLA polypeptide of the present application is capable of converting a substrate to the desired product compound, Exemplary “suitable reaction conditions” are provided in the present application and illustrated by the Examples. “Enzyme loading” refers to the concentration or amount of a component in a reaction mixture at the start of the reaction. “Substrate” in the context of an enzymatic conversion reaction process refers to the compound or molecule acted on by the GLA polypeptide. “Product” in the context of an enzymatic conversion process refers to the compound or molecule resulting from the action of the GLA polypeptide on a substrate.

[0086] As used herein the term “culturing” refers to the growing of a population of microbial, mammalian, or other suitable cells under any suitable conditions (e.g., using a liquid, gel or solid medium).

[0087] Recombinant polypeptides can be produced using any suitable methods known the art. Genes encoding the wild-type polypeptide of interest can be cloned in vectors, such as plasmids, and expressed in desired hosts, such as E. coli, S. cerevisiae, or mammalian cell lines (e.g., HEK, or CHO cells), etc. Variants of recombinant polypeptides can be generated by various methods known in the art. Indeed, there is a wide variety of different mutagenesis techniques well known to those skilled in the art. In addition, mutagenesis kits are also available from many commercial molecular biology suppliers. Methods are available to make specific substitutions at defined amino acids (site-directed), specific or random mutations in a localized region of the gene (regio-specific), or random mutagenesis over the entire gene (e.g., saturation mutagenesis). Numerous suitable methods are known to those in the art to generate enzyme variants, including but not limited to site-directed mutagenesis of single-stranded DNA or double-stranded DNA using PCR, cassette mutagenesis, gene synthesis, error-prone PCR, shuffling, and chemical saturation mutagenesis, or any other suitable method known in the art. Non-limiting examples of methods used for DNA and protein engineering are provided in the following patents: U.S. Pat. Nos. 6,117,679; 6,420,175; 6,376,246; 6,586,182; 7,747,391; 7,747,393; 7,783,428; and 8,383,346. After the variants are produced, they can be screened for any desired property (e.g., high or increased activity, or low or reduced activity, increased thermal activity, increased thermal stability, and/or acidic pH stability, etc.). In some embodiments, “recombinant GLA polypeptides” (also referred to herein as “engineered GLA polypeptides,” “variant GLA enzymes,” and “GLA variants”) find use.

[0088] As used herein, a “vector” is a DNA construct for introducing a DNA sequence into a cell. In some embodiments, the vector is an expression vector that is operably linked to a suitable control sequence capable of effecting the expression in a suitable host of the polypeptide encoded in the DNA sequence. In some embodiments, an “expression vector” has a promoter sequence operably linked to the DNA sequence (e.g., transgene) to drive expression in a host cell, and in some embodiments, also comprises a transcription terminator sequence.

[0089] As used herein, the term “gene therapy vector” refers to vehicles or carriers suitable for delivery of polynucleotide sequences to cells. In some embodiments, the vectors encapsulate genes (e.g., therapeutic genes) or polynucleotide sequences for delivery to cells or tissues, including but not limited to adenovirus (AV), adeno-associated virus (AAV), lentivirus (LV), and non-viral vectors, such as liposomes. It is not intended that the present invention be limited to any specific gene therapy vector, as any vehicle suitable for a given setting finds use. The gene therapy vector may be designed to deliver genes to a specific species or host, or may find more general applicability.

[0090] As used herein, the term “expression” includes any step involved in the production of the polypeptide including, but not limited to, transcription, post-transcriptional modification, translation, and post-translational modification. In some embodiments, the term also encompasses secretion of the polypeptide from a cell.

[0091] As used herein, the term “produces” refers to the production of proteins and/or other compounds by cells. It is intended that the term encompass any step involved in the production of polypeptides including, but not limited to, transcription, post-transcriptional modification, translation, and post-translational modification. In some embodiments, the term also encompasses secretion of the polypeptide from a cell.

[0092] As used herein, an amino acid or nucleotide sequence (e.g., a promoter sequence, signal peptide, terminator sequence, etc.) is “recombinant” or “heterologous” to another sequence with which it is operably linked if the two sequences are not associated in nature.

[0093] As used herein, the terms “host cell” and “host strain” refer to suitable hosts for expression vectors comprising DNA provided herein (e.g., the polynucleotides encoding the GLA variants). In some embodiments, the host cells are prokaryotic or eukaryotic cells that have been transformed or transfected with vectors constructed using recombinant DNA techniques as known in the art.

[0094] The term “analogue” means a polypeptide having more than 70% sequence identity but less than 100% sequence identity (e.g., more than 75%, 78%, 80%, 83%, 85%, 88%, 90%, 91%, 92%, 93%, 94%, 95%, 96%, 97%, 98%, 99% sequence identity) with a reference polypeptide. In some embodiments, “analogues” means polypeptides that contain one or more non-naturally occurring amino acid residues including, but not limited, to homoarginine, ornithine and norvaline, as well as naturally occurring amino acids. In some embodiments, analogues also include one or more D-amino acid residues and non-peptide linkages between two or more amino acid residues.

[0095] As used herein, the term “therapeutic” refers to a compound administered to a subject who shows signs or symptoms of pathology having beneficial or desirable medical effects.

[0096] As used herein, the term “pharmaceutical composition” refers to a composition suitable for pharmaceutical use in a mammalian subject (e.g., human) comprising a pharmaceutically effective amount of an engineered GLA polypeptide encompassed by the invention and an acceptable carrier.

[0097] As used herein, the term “gene therapy” refers to the delivery of a gene, polydeoxyribonucleotide, or polynucleotide sequence(s) with a gene therapy vector to cells or tissues for the modification of those cells or tissues for the treatment of prevention of a disease. Gene therapy may include replacing a mutated gene that causes disease with a healthy copy of the gene, or inactivating, or “knocking out,” a mutated gene that is functioning improperly. In some embodiments, gene therapy is used in the treatment of disease in patients.

[0098] As used herein, the term “mRNA therapy” refers to the delivery of an mRNA polyribonucleotide sequence to cells or tissues for the modification of those cells or tissues for the treatment or prevention of a disease. In some embodiments, the mRNA polynucleotide sequences for delivery to cells or tissue, are formulated, for instance, but not limited to, in liposomes. In some embodiments, mRNA therapy is used in the treatment of disease in patients.

[0099] As used herein, the term “cell therapy” refers to the delivery of living cells that have been modified exogenously to patients to provide a missing gene for the treatment or prevention of a disease. The modified cells are then reintroduced into the body.

[0100] As used herein, the term “effective amount” means an amount sufficient to produce the desired result. One of general skill in the art may determine what the effective amount by using routine experimentation.

[0101] The terms “isolated” and “purified” are used herein to refer to a molecule (e.g., an isolated nucleic acid, polypeptide, etc.) or other component that is removed from at least one other component with which it is naturally associated. The term “purified” does not require absolute purity, rather it is intended as a relative definition.

[0102] As used herein, the term “subject” encompasses mammals such as humans, non-human primates, livestock, companion animals, and laboratory animals (e.g., rodents and lagamorphs). It is intended that the term encompass females as well as males.

[0103] As used herein, the term “patient” means any subject that is being assessed for, treated for, or is experiencing disease.

[0104] The term “infant” refers to a child in the period of the first month after birth to approximately one (1) year of age. As used herein, the term “newborn” refers to child in the period from birth to the 28th day of life. The term “premature infant” refers to an infant born after the twentieth completed week of gestation, yet before full term, generally weighing˜500 to ˜2499 grams at birth. A “very low birth weight infant” is an infant weighing less than 1500 g at birth.

[0105] As used herein, the term “child” refers to a person who has not attained the legal age for consent to treatment or research procedures. In some embodiments, the term refers to a person between the time of birth and adolescence.

[0106] As used herein, the term “adult” refers to a person who has attained legal age for the relevant jurisdiction (e.g., 18 years of age in the United States). In some embodiments, the term refers to any fully grown, mature organism. In some embodiments, the term “young adult” refers to a person less than 18 years of age, but who has reached sexual maturity.

[0107] As used herein, “composition” and “formulation” encompass products comprising at least one engineered GLA of the present invention, intended for any suitable use (e.g., pharmaceutical compositions, dietary/nutritional supplements, feed, etc.).

[0108] As used herein, the terms “administration” and “administering” a composition mean providing a composition of the present invention to a subject (e.g., to a person suffering from the effects of Fabry disease).

[0109] As used herein, the term “carrier” when used in reference to a pharmaceutical composition means any of the standard pharmaceutical carrier, buffers, and excipients, such as stabilizers, preservatives, and adjuvants.

[0110] As used herein, the term “pharmaceutically acceptable” means a material that can be administered to a subject without causing any undesirable biological effects or interacting in a deleterious manner with any of the components in which it is contained and that possesses the desired biological activity.

[0111] As used herein, the term “excipient” refers to any pharmaceutically acceptable additive, carrier, diluent, adjuvant, or other ingredient, other than the active pharmaceutical ingredient (API; e.g., the engineered GLA polypeptides of the present invention). Excipients are typically included for formulation and/or administration purposes.

[0112] As used herein, the term “therapeutically effective amount” when used in reference to symptoms of disease/condition refers to the amount and/or concentration of a compound (e.g., engineered GLA polypeptides) that ameliorates, attenuates, or eliminates one or more symptom of a disease/condition or prevents or delays the onset of symptom(s).

[0113] As used herein, the term “therapeutically effective amount” when used in reference to a disease/condition refers to the amount and/or concentration of a composition (e.g., engineered GLA polypeptides) that ameliorates, attenuates, or eliminates the disease/condition. In some embodiments, the term is use in reference to the amount of a composition that elicits the biological (e.g., medical) response by a tissue, system, or animal subject that is sought by the researcher, physician, veterinarian, or other clinician.

[0114] It is intended that the terms “treating,” “treat” and “treatment” encompass preventative (e.g., prophylactic), as well as palliative treatment.

### Engineered GLA Expression and Activity:

[0115] Secreted expression of a yeast codon-optimized mature human GLA was achieved using a synthetic mouse IG signal peptide. Clones were expressed from a pCDNA3.1(+) vector in HEK293T cells. This approach provided supernatants with measurable activity on the fluorogenic substrate 4-methylumbelliferyl α-D-galactopyranoside (4-MuGal).

[0116] In some embodiments, to identify mutational diversity with similar stability and improved cellular uptake compared to SEQ ID NO: 8, a combinatorial library was constructed generating GLA variants derived from SEQ ID NO: 8. Equivalent volumes of supernatant were screened in an unchallenged condition (no incubation, pH 4.6) or following a one-hour incubation in a low pH (3.9-4.2), a neutral pH (7.0-7.6) or human serum (physiological pH 7.1-8.2) environment. GLA variants with activity due to increased GLA expression or GLA specific activity were identified based on their fold improvement over the parent GLA. GLA variants with increased stability were identified by dividing the fold-improvement observed under challenged conditions by the fold-improvement observed under unchallenged conditions. This approach reduces the bias towards selecting variants based on increased expression but without changes in specific activity at pH extremes. Composite activity scores (the product of fold-improvements for all three conditions) and stability (the product of stability scores) were used to rank mutations in improved variants for inclusion in subsequent GLA libraries. In additional embodiments, the additional methods and sequences described in the Examples were used.

### Engineered GLA:

[0117] In some embodiments the engineered GLA which exhibits an improved property has at least about 85%, at least about 88%, at least about 90%, at least about 91%, at least about 92%, at least about 93%, at least about 94%, at least about 95%, at least about 96%, at least about 97%, at least about 98%, at least about 99%, or at about 100% amino acid sequence identity with SEQ ID NO: 2, 8, 48, 158, 372, 374, 704, and/or 1022, and an amino acid residue difference as compared to SEQ ID NO: 2, 8, 48, 158, 372, 374, 704, and/or 1022, at one or more amino acid positions (such as at 1, 2, 3, 4, 5, 6, 7, 8, 9, 10, 11, 12, 14, 15, 20 or more amino acid positions compared to SEQ ID NO: 2, 8, 48, 158, 372, 374, 704, and/or 1022, or a sequence having at least 85%, at least 88%, at least 90%, at least 91%, at least 92%, at least 93%, at least 94%, at least 95%, at least 96%, at least 97%, at least 98%, at least 99% or greater amino acid sequence identity with SEQ ID NO: 2, 8, 48, 158, 372, 374, 704, and/or 1022). In some embodiment the residue difference as compared to SEQ ID NO:5, at one or more positions include at least 1, 2, 3, 4, 5, 6, 7, 8, 9, 10 or more conservative amino acid substitutions. In some embodiments, the engineered GLA polypeptide is a polypeptide listed in Table 2-1, 5-1, 6-1, 7-1, 8-1, 9-1, 11-1, 12-1, and/or 13-1. In some embodiments, the engineered GLA polypeptide comprises SEQ ID NO: 2, 8, 48, 158, 372, 374, 704, and/or 1022.

[0118] The present invention also provides recombinant alpha galactosidase A wherein said comprises a polypeptide sequence having at least 85%, 86%, 87%, 88%, 89%, 90%, 91%, 92%, 93%, 94%, 95%, 96%, 97%, 98%, 99%, or more sequence identity to SEQ ID NO: 8, or a functional fragment thereof, and wherein said recombinant alpha galactosidase A comprises at least one substitution or substitution set at one or more positions selected from 44, 44/217, 44/217/316, 44/217/322, 44/217/322/337, 44/247, 44/247/302, 44/247/302/322, 44/247/322, 44/247/337, 44/247/362, 44/302, 44/337, 44/373, 217/322, 217/373, 247/322, 247/362, 302/322/362/373, 302/337, 316, 316/337, 322, 322/337, 362/373, and 373, wherein the amino acid positions of said polypeptide sequence are numbered with reference to SEQ ID NO: 8. In some embodiments, the recombinant alpha galactosidase A comprises a polypeptide sequence having at least 85%, 86%, 87%, 88%, 89%, 90%, 91%, 92%, 93%, 94%, 95%, 96%, 97%, 98%, 99%, or more sequence identity to SEQ ID NO: 8, or a functional fragment thereof, and wherein said recombinant alpha galactosidase A comprises at least one substitution or substitution set at one or more positions selected from 44L, 44L/217F, 44L/217F/316L, 44L/217F/322M, 44L/217F/322M/337A, 44L/247N, 44L/247N/302Q, 44L/247N/302Q/322M, 44L/247N/322M, 44L/247N/337A, 44L/247N/362K, 44L/302Q, 44L/337A, 44L/373R, 217F/322M, 217F/373R, 247N/322M, 247N/362K, 302Q/322M/362K/373R, 302Q/337A, 316L, 316L/337A, 322M, 322M/337A, 362K/373R, and 373R, wherein the amino acid positions of said polypeptide sequence are numbered with reference to SEQ ID NO: 8. In some embodiments, the recombinant alpha galactosidase A comprises a polypeptide sequence having at least 85%, 86%, 87%, 88%, 89%, 90%, 91%, 92%, 93%, 94%, 95%, 96%, 97%, 98%, 99%, or more sequence identity to SEQ ID NO: 8, or a functional fragment thereof, and wherein said recombinant alpha galactosidase A comprises at least one substitution or substitution set at one or more positions selected from R44L, R44L/R217F, R44L/R217F/D316L, R44L/R217F/I322M, R44L/R217F/I322M/P337A, R44L/D247N, R44L/D247N/K302Q, R44L/D247N/K302Q/I322M, R44L/D247N/I322M, R44L/D247N/P337A, R44L/D247N/Q362K, R44L/K302Q, R44L/P337A, R44L/K373R, R217F/I322M, R217F/K373R, D247N/I322M, D247N/Q362K, K302Q/I322M/Q362K/K373R, K302Q/P337A, D316L, D316L/P337A, I322M, I322M/P337A, Q362K/K373R, and K373R, wherein the amino acid positions of said polypeptide sequence are numbered with reference to SEQ ID NO: 8.

[0119] The present invention also provides recombinant alpha galactosidase A wherein said comprises a polypeptide sequence having at least 85%, 86%, 87%, 88%, 89%, 90%, 91%, 92%, 93%, 94%, 95%, 96%, 97%, 98%, 99%, or more sequence identity to SEQ ID NO: 8, or a functional fragment thereof, and wherein said recombinant alpha galactosidase A comprises at least one substitution or substitution set at one or more positions selected from 10/39/44/47/92/166/206/217/247/261/271/302/316/322/337/362/368/373/392, 44/217/316, 44/217/322/337, 166/362, 217/373, and 362/373, wherein the amino acid positions of said polypeptide sequence are numbered with reference to SEQ ID NO: 8. In some embodiments, the recombinant alpha galactosidase A comprises a polypeptide sequence having at least 85%, 86%, 87%, 88%, 89%, 90%, 91%, 92%, 93%, 94%, 95%, 96%, 97%, 98%, 99%, or more sequence identity to SEQ ID NO: 8, or a functional fragment thereof, and wherein said recombinant alpha galactosidase A comprises at least one substitution or substitution set at one or more positions selected from 10T/39M/44L/47S/92 Y/166S/206K/217F/247N/261A/271H/302Q/316L/322M/337A/362K/368W/37 3R/392M, 44L/217F/316L, 44L/217F/322M/337A, 166A/362K, 217F/373R, and 362K/373R, wherein the amino acid positions of said polypeptide sequence are numbered with reference to SEQ ID NO: 8. In some embodiments, the recombinant alpha galactosidase A comprises a polypeptide sequence having at least 85%, 86%, 87%, 88%, 89%, 90%, 91%, 92%, 93%, 94%, 95%, 96%, 97%, 98%, 99%, or more sequence identity to SEQ ID NO: 8, or a functional fragment thereof, and wherein said recombinant alpha galactosidase A comprises at least one substitution or substitution set at one or more positions selected from P10T/E39M/R44L/T47S/H92Y/P166S/A206K/R217F/D247N/G261A/A271H/K302Q/D316L/1322M/P337A/Q362K/A368W/K373R/T392M, R44L/R217F/D316L, R44L/R217F/1322M/P337A, P166A/Q362K, R217F/K373R, and Q362K/K373R, wherein the amino acid positions of said polypeptide sequence are numbered with reference to SEQ ID NO: 8.

[0120] The present invention also provides recombinant alpha galactosidase A wherein said comprises a polypeptide sequence having at least 85%, 86%, 87%, 88%, 89%, 90%, 91%, 92%, 93%, 94%, 95%, 96%, 97%, 98%, 99%, or more sequence identity to SEQ ID NO: 58, or a functional fragment thereof, and wherein said recombinant alpha galactosidase A comprises at least one substitution or substitution set at one or more positions selected from 7, 7/48/68, 7/48/68/120/282/299, 7/48/130/282, 7/48/180, 7/68/130/282/365, 7/68/180, 7/88/120/305/365, 7/120, 7/130, 7/282, 7/305, 7/305/365, 7/365, 39, 47, 47/87/95/96/158/162, 47/95, 47/273, 47/343, 48, 48/68, 48/180/282, 48/282, 48/282/305, 67/180, 68, 68/299/300, 71, 87/91/95/96/158/162, 87/91/95/96/206/343, 87/96/155/273/343, 88, 91/95, 91/95/96, 92, 93, 96, 96/273, 96/312/343, 120, 120/299/305, 151, 158, 158/162/273, 162, 162/273, 162/343, 166, 178, 180, 181, 206, 217, 271, 273, 273/343, 282, 282/365, 293/391, 299/300, 299/300/305/365, 300, 301, 305, 305/365, 314, 333, 336, 337, 343, 345, 363, 365, 370, 389, 393, 394, 396/398, 397, and 398, wherein the amino acid positions of said polypeptide sequence are numbered with reference to SEQ ID NO: 58. In some embodiments, the recombinant alpha galactosidase A comprises a polypeptide sequence having at least 85%, 86%, 87%, 88%, 89%, 90%, 91%, 92%, 93%, 94%, 95%, 96%, 97%, 98%, 99%, or more sequence identity to SEQ ID NO: 58, or a functional fragment thereof, and wherein said recombinant alpha galactosidase A comprises at least one substitution or substitution set at one or more positions selected from 7L, 7L/48D/68E, 7L/48D/68E/120H/282N/299R, 7L/48D/130E/282N, 7L/48D/180G, 7L/68E/130E/282N/365V, 7L/68E/180G, 7L/88A/120H/305G/365V, 7L/120H, 7L/130E, 7L/282N, 7L/305G, 7L/305G/365V, 7L/365V, 39V, 47D, 47D/87K/95E/96L/158R/162H, 47D/95E, 47D/273P, 47D/343G, 47V, 48D, 48D/68E, 48D/180G/282N, 48D/282N, 48D/282N/305G, 67T/180G, 68E, 68E/299R/300I, 71P, 87K/91Q/95E/96L/158A/162K, 87K/91Q/95E/96L/206S/343G, 87K/96I/155N/273P/343G, 88A, 91Q/95E, 91Q/95E/96L, 92F, 92T, 93I, 96L, 96L/273P, 96L/312Q/343G, 120H, 120H/299R/305G, 151L, 158A, 158A/162K/273G, 158R, 162H/343D, 162K, 162K/273P, 162S, 166K, 178G, 178S, 180G, 180L, 180T, 180V, 181A, 206K, 206S, 217K, 271R, 273P, 273P/343G, 282N, 282N/365V, 293P/391A, 299R/300I, 299R/300I/305G/365V, 300I, 301M, 305G, 305G/365V, 314A, 333F, 333G, 336V, 337R, 343D, 343G, 345A, 345Q, 363Q, 365A, 365Q, 365V, 370G, 389K, 393V, 394K, 396G/398T, 397A, 398A, 398P, 398S, and 398V, wherein the amino acid positions of said polypeptide sequence are numbered with reference to SEQ ID NO: 58.

[0121] In some embodiments, the recombinant alpha galactosidase A comprises a polypeptide sequence having at least 85%, 86%, 87%, 88%, 89%, 90%, 91%, 92%, 93%, 94%, 95%, 96%, 97%, 98%, 99%, or more sequence identity to SEQ ID NO: 58, or a functional fragment thereof, and wherein said recombinant alpha galactosidase A comprises at least one substitution or substitution set at one or more positions selected from R7L, R7L/E48D/Q68E, R7L/E48D/Q68E/Y120H/D282N/Q299R, R7L/E48D/D130E/D282N, R7L/E48D/F180G, R7L/Q68E/D130E/D282N/F365V, R7L/Q68E/F180G, R7L/Q88A/Y120H/N305G/F365V, R7L/Y120H, R7L/D130E, R7L/D282N, R7L/N305G, R7L/N305G/F365V, R7L/F365V, E39V, T47D, T47D/R87K/595E/K96L/L158R/R162H, T47D/595E, T47D/S273P, T47D/K343G, T47V, E48D, E48D/Q68E, E48D/F180G/D282N, E48D/D282N, E48D/D282N/N305G, P67T/F180G, Q68E, Q68E/Q299R/L300I, S71P, R87K/N91Q/595E/K96L/L158A/R162K, R87K/N91Q/595E/K96L/A206S/K343G, R87K/K96I/H155N/5273P/K343G, Q88A, N91Q/595E, N91Q/595E/K96L, H92F, H92T, V93I, K96L, K96L/S273P, K96L/P312Q/K343G, Y120H, Y120H/Q299R/N305G, D151L, L158A, L158A/R162K/5273G, L158R, R162H/K343D, R162K, R162K/5273P, R162S, P166K, W178G, W178S, F180G, F180L, F180T, F180V, Q181A, A206K, A206S, R217K, A271R, S273P, S273P/K343G, D282N, D282N/F365V, L293P/Q391A, Q299R/L300I, Q299R/L300I/N305G/F365V, L300I, R301M, N305G, N305G/F365V, S314A, S333F, S333G, I336V, P337R, K343D, K343G, V345A, V345Q, L363Q, F365A, F365Q, F365V, 5370G, T389K, S393V, L394K, D396G/L398T, L397A, L398A, L398P, L398S, and L398V, wherein the amino acid positions of said polypeptide sequence are numbered with reference to SEQ ID NO: 58.

[0122] The present invention also provides recombinant alpha galactosidase A wherein said comprises a polypeptide sequence having at least 85%, 86%, 87%, 88%, 89%, 90%, 91%, 92%, 93%, 94%, 95%, 96%, 97%, 98%, 99%, or more sequence identity to SEQ ID NO: 158, or a functional fragment thereof, and wherein said recombinant alpha galactosidase A comprises at least one substitution or substitution set at one or more positions selected from 24/202, 39/47, 39/47/217, 39/151, 39/282/337/398, 39/337/343/398, 39/393/398, 47/130, 47/151, 47/343/345/393, 48, 48/68, 48/68/217/333/391/393, 48/68/333, 48/217, 48/333, 48/345/393, 48/393, 59/143, 68, 68/345, 130, 130/158, 130/158/393, 130/345/393, 143/271, 143/333, 143/387, 151, 151/158/217/343/345/393, 151/206/282/337/343/345/398, 151/282/393, 151/345/393/398, 151/393, 158, 158/393, 202, 206, 206/217, 217, 217/333, 217/337/345/398, 271, 282/393, 333, 333/345, 337/343/345/398, 343, 343/345/393/398, 393, and 393/398, wherein the amino acid positions of said polypeptide sequence are numbered with reference to SEQ ID NO: 158. In some embodiments, the recombinant alpha galactosidase A comprises a polypeptide sequence having at least 85%, 86%, 87%, 88%, 89%, 90%, 91%, 92%, 93%, 94%, 95%, 96%, 97%, 98%, 99%, or more sequence identity to SEQ ID NO: 158, or a functional fragment thereof, and wherein said recombinant alpha galactosidase A comprises at least one substitution or substitution set at one or more positions selected from 24S/202N, 39V/47D, 39V/47V/217K, 39V/151L, 39V/282N/337R/398A, 39V/337R/343G/398A, 39V/393V/398A, 47V/130E, 47V/151L, 47V/343D/345Q/393V, 48D, 48D/68E, 48D/68E/217K/333F/391A/393V, 48D/68E/333F, 48D/217K, 48D/333F, 48D/333G, 48D/345Q/393V, 48D/393V, 59A/143S, 68E, 68E/345Q, 130E, 130E/158R, 130E/158R/393V, 130E/345Q/393V, 143S/271N, 143S/333N, 143S/387N, 151L, 151L/158R/217K/343G/345Q/393V, 151L/206S/282N/337R/343D/345Q/398A, 151L/282N/393V, 151L/345Q/393V/398A, 151L/393V, 158R, 158R/393V, 202N, 206S, 206S/217K, 217K, 217K/333F, 217K/333G, 217K/337R/345Q/398A, 271N, 282N/393V, 333F/345Q, 333G, 333N, 337R/343G/345Q/398A, 343D, 343D/345Q/393V/398A, 393V, and 393V/398A, wherein the amino acid positions of said polypeptide sequence are numbered with reference to SEQ ID NO: 158. In some embodiments, the recombinant alpha galactosidase A comprises a polypeptide sequence having at least 85%, 86%, 87%, 88%, 89%, 90%, 91%, 92%, 93%, 94%, 95%, 96%, 97%, 98%, 99%, or more sequence identity to SEQ ID NO: 158, or a functional fragment thereof, and wherein said recombinant alpha galactosidase A comprises at least one substitution or substitution set at one or more positions selected from D24S/D202N, E39V/T47D, E39V/T47V/R217K, E39V/D151L, E39V/D282N/P337R/L398A, E39V/P337R/K343G/L398A, E39V/S393V/L398A, T47V/D130E, T47V/D151L, T47V/K343D/V345Q/5393V, E48D, E48D/Q68E, E48D/Q68E/R217K/5333F/Q391A/5393V, E48D/Q68E/S333F, E48D/R217K, E48D/S333F, E48D/S333G, E48D/V345Q/5393V, E48D/S393V, C59A/C143S, Q68E, Q68E/V345Q, D130E, D130E/L158R, D130E/L158R/5393V, D130E/V345Q/5393V, C143S/A271N, C143S/5333N, C143S/E387N, D151L, D151L/L158R/R217K/K343G/V345Q/5393V, D151L/A206S/D282N/P337R/K343D/V345Q/L398A, D151L/D282N/5393V, D151L/V345Q/5393V/L398A, D151L/5393V, L158R, L158R/5393V, D202N, A206S, A206S/R217K, R217K, R217K/5333F, R217K/5333G, R217K/P337R/V345Q/L398A, A271N, D282N/S393V, 5333F/V345Q, S333G, S333N, P337R/K343G/V345Q/L398A, K343D, K343D/V345Q/5393V/L398A, S393V, and S393V/L398A, wherein the amino acid positions of said polypeptide sequence are numbered with reference to SEQ ID NO: 158.

[0123] The present invention also provides recombinant alpha galactosidase A wherein said comprises a polypeptide sequence having at least 85%, 86%, 87%, 88%, 89%, 90%, 91%, 92%, 93%, 94%, 95%, 96%, 97%, 98%, 99%, or more sequence identity to SEQ ID NO: 372, or a functional fragment thereof, and wherein said recombinant alpha galactosidase A comprises at least one substitution or substitution set at one or more positions selected from 10, 10/39/44/322, 10/39/92/206/217/271, 10/39/92/247, 10/39/92/247/271/316, 10/44, 10/44/47/92/247, 10/44/47/261/302/322/368, 10/44/92/316/322, 10/44/261/302/316, 10/44/302/337/368, 10/47/217/247/316/392, 10/47/217/322, 10/47/271, 10/92, 10/92/206/217/247, 10/92/206/247/316/322/392, 10/92/206/247/322/368, 10/92/217/261/302/337, 10/206/217/271, 10/206/247, 10/206/261/271/316, 10/261, 10/271/302, 10/302, 10/302/316, 10/302/322/337, 10/316/322, 10/337/392, 10/368, 39/44/92/162/247/302/316/322, 39/44/92/217/322, 39/44/92/247/271/302, 39/47/92/247/302/316/322, 39/47/217/247/368, 39/47/247, 39/92/247/302/316/337/368, 39/92/316/322, 39/247/271, 39/247/271/316, 39/322, 44/47/92/206/217/316/322, 44/47/92/247/261/271/316/337/368, 44/47/206/217/247/271/322, 44/47/247/322/368, 44/47/302/316/322, 44/92/206/247/368, 44/206/337, 44/247/261/302/316, 44/247/261/302/316/322, 47/92/247/271, 47/217/302, 47/247, 47/247/271, 89/217/247/261/302/316, 92/217/271, 92/247, 92/247/271/322, 92/247/302/322/337, 92/271/337, 92/302, 92/316, 206/217/271/392, 217/247/316/322/337/368, 247, 247/271, 247/302, 271, 271/302/322, 271/316/322, 302/322/368, and 368, wherein the amino acid positions of said polypeptide sequence are numbered with reference to SEQ ID NO: 372. In some embodiments, the recombinant alpha galactosidase A comprises a polypeptide sequence having at least 85%, 86%, 87%, 88%, 89%, 90%, 91%, 92%, 93%, 94%, 95%, 96%, 97%, 98%, 99%, or more sequence identity to SEQ ID NO: 372, or a functional fragment thereof, and wherein said recombinant alpha galactosidase A comprises at least one substitution or substitution set at one or more positions selected from 10P, 10P/39E/44R/322I, 10P/39E/92H/206A/217R/271A, 10P/39E/92H/247D, 10P/39E/92H/247D/271A/316D, 10P/44R, 10P/44R/47T/92H/247D, 10P/44R/47T/261G/302K/322I/368A, 10P/44R/92H/316D/322I, 10P/44R/261G/302K/316D, 10P/44R/302K/337P/368A, 10P/47T/217R/247D/316D/392T, 10P/47T/217R/322I, 10P/47T/271A, 10P/92H, 10P/92H/206A/217R/247D, 10P/92H/206A/247D/316D/322I/392T, 10P/92H/206A/247D/322I/368A, 10P/92H/217R/261G/302K/337P, 10P/206A/217R/271A, 10P/206A/247D, 10P/206A/261G/271A/316D, 10P/261G, 10P/271A/302K, 10P/302K, 10P/302K/316D, 10P/302K/322I/337P, 10P/316D/322I, 10P/337P/392T, 10P/368A, 39E/44R/92H/162M/247D/302K/316D/322I, 39E/44R/92H/217R/322I, 39E/44R/92H/247D/271A/302K, 39E/47T/92H/247D/302K/316D/322I, 39E/47T/217R/247D/368A, 39E/47T/247D, 39E/92H/247D/302K/316D/337P/368A, 39E/92H/316D/322I, 39E/247D/271A, 39E/247D/271A/316D, 39E/322I, 44R/47T/92H/206A/217R/316D/322I, 44R/47T/92H/247D/261G/271A/316D/337P/368A, 44R/47T/206A/217R/247D/271A/322I, 44R/47T/247D/322I/368A, 44R/47T/302K/316D/322I, 44R/92H/206A/247D/368A, 44R/206A/337P, 44R/247D/261G/302K/316D, 44R/247D/261G/302K/316D/322I, 47T/92H/247D/271A, 47T/217R/302K, 47T/247D, 47T/247D/271A, 89I/217R/247D/261G/302K/316D, 92H/217R/271A, 92H/247D, 92H/247D/271A/322I, 92H/247D/302K/322I/337P, 92H/271A/337P, 92H/302K, 92H/316D, 206A/217R/271A/392T, 217R/247D/316D/322I/337P/368A, 247D, 247D/271A, 247D/302K, 271A, 271A/302K/322I, 271A/316D/322I, 302K/322I/368A, and 368A, wherein the amino acid positions of said polypeptide sequence are numbered with reference to SEQ ID NO: 372. In some embodiments, the recombinant alpha galactosidase A comprises a polypeptide sequence having at least 85%, 86%, 87%, 88%, 89%, 90%, 91%, 92%, 93%, 94%, 95%, 96%, 97%, 98%, 99%, or more sequence identity to SEQ ID NO: 372, or a functional fragment thereof, and wherein said recombinant alpha galactosidase A comprises at least one substitution or substitution set at one or more positions selected from T10P, T10P/M39E/L44R/M322I, T10P/M39E/Y92H/K206A/F217R/H271A, T10P/M39E/Y92H/N247D, T10P/M39E/Y92H/N247D/H271A/L316D, T10P/L44R, T10P/L44R/S47T/Y92H/N247D, T10P/L44R/S47 T/A261G/Q302K/M322I/W368A, T10P/L44R/Y92H/L316D/M322I, T10P/L44R/A261G/Q302K/L316D, T10P/L44R/Q302K/A337P/W368A, T10P/S47T/F217R/N247D/L316D/M392T, T10P/S47T/F217R/M322I, T10P/S47T/H271A, T10P/Y92H, T10P/Y92H/K206A/F217R/N247D, T10P/Y92H/K206A/N247D/L316D/M322I/M392T, T10P/Y92H/K206A/N247D/M322I/W368A, T10P/Y92H/F217R/A261G/Q302K/A337P, T10P/K206A/F217R/H271A, T10P/K206A/N247D, T10P/K206A/A261G/H271A/L316D, T10P/A261G, T10P/H271A/Q302K, T10P/Q302K, T10P/Q302K/L316D, T10P/Q302K/M322I/A337P, T10P/L316D/M322I, T10P/A337P/M392T, T10P/W368A, M39E/L44R/Y92H/R162M/N247D/Q302K/L316D/M322I, M39E/L44R/Y92H/F217R/M322I, M39E/L44R/Y92H/N247D/H271A/Q302K, M39E/S47T/Y92H/N247D/Q302K/L316D/M322I, M39E/S47T/F217R/N247D/W368A, M39E/S47T/N247D, M39E/Y92H/N247D/Q302K/L316D/A337P/W368A, M39E/Y92H/L316D/M322I, M39E/N247D/H271A, M39E/N247D/H271A/L316D, M39E/M322I, L44R/S47T/Y92H/K206A/F217R/L316D/M322I, L44R/S47T/Y92H/N247D/A261G/H271A/L316D/A337P/W368A, L44R/S47T/K206A/F217R/N247D/H271A/M322I, L44R/S47T/N247D/M322I/W368A, L44R/S47T/Q302K/L316D/M322I, L44R/Y92H/K206A/N247D/W368A, L44R/K206A/A337P, L44R/N247D/A261G/Q302K/L316D, L44R/N247D/A261G/Q302K/L316D/M322I, S47T/Y92H/N247D/H271A, S47T/F217R/Q302K, S47T/N247D, S47T/N247D/H271A, L89I/F217R/N247D/A261G/Q302K/L316D, Y92H/F217R/H271A, Y92H/N247D, Y92H/N247D/H271A/M322I, Y92H/N247D/Q302K/M322I/A337P, Y92H/H271A/A337P, Y92H/Q302K, Y92H/L316D, K206A/F217R/H271A/M392T, F217R/N247D/L316D/M322I/A337P/W368A, N247D, N247D/H271A, N247D/Q302K, H271A, H271A/Q302K/M322I, H271A/L316D/M322I, Q302K/M322I/W368A, and W368A, wherein the amino acid positions of said polypeptide sequence are numbered with reference to SEQ ID NO: 372.

[0124] The present invention also provides recombinant alpha galactosidase A wherein said comprises a polypeptide sequence having at least 85%, 86%, 87%, 88%, 89%, 90%, 91%, 92%, 93%, 94%, 95%, 96%, 97%, 98%, 99%, or more sequence identity to SEQ ID NO: 374, or a functional fragment thereof, and wherein said recombinant alpha galactosidase A comprises at least one substitution or substitution set at one or more positions selected from 10/36/92/166/247/261/316/392, 10/39, 10/39/44/47/92/206/217, 10/39/44/47/316, 10/39/44/47/337, 10/39/44/92/166/261/316/322, 10/39/44/92/166/302/322, 10/39/44/92/166/392, 10/39/44/92/217/302/322, 10/39/44/92/302/322, 10/39/44/166/261/271/316/322, 10/39/44/392, 10/39/47/92/337, 10/39/92/131/166/271/316/322, 10/39/92/166/217/247/271, 10/39/92/217/316, 10/44/47/166/261/271, 10/44/47/166/271/322/368, 10/44/47/217/271/316/322, 10/44/92, 10/44/92/217/247/271/302/316/392, 10/44/166/302, 10/44/206/316/322, 10/47/92/166/271/316/337, 10/47/92/271/302, 10/47/92/316/322/392, 10/47/166/271, 10/47/166/316, 10/92/166, 10/92/166/217/247/261/271, 10/92/166/261/271/392, 10/92/166/261/316/322/337, 10/92/166/337/368, 10/92/302/337, 10/92/316/322, 10/206, 10/206/247/261, 10/217/322, 10/261, 10/261/337/392, 10/316/392, 10/368, 39/44/47/92/166/206/392, 39/44/47/92/206/247/261, 39/44/47/92/206/392, 39/44/47/206/337/368/392, 39/44/92/166/247/261/302/337, 39/44/166/271, 39/44/166/271/337/368/392, 39/47/92/316/322, 39/47/92/392, 39/47/166/217/261/392, 39/47/217/247/368, 39/47/247, 39/92/166/217/392, 39/92/261/302, 39/166/217/261/316/368, 39/322, 39/392, 44/47, 44/47/92/217/271, 44/47/92/217/316/322/392, 44/47/92/392, 44/47/166, 44/47/166/271, 44/47/247/271/392, 44/316/322/392, 44/337, 47/166/206/217/247/337, 47/166/217/271/337, 47/206, 47/217/247/261, 47/271, 52/217/302/316, 92/166/206/271/316, 92/166/217/261/271/392, 92/166/217/316/337/392, 92/166/247, 92/166/316, 92/206/322, 92/217, 92/217/271/337, 92/261/271, 92/271, 166/217/316/322/337, 166/247/271/316, 166/316/322/337, 206/217, 217/392, 247/316, 316/322/368, and 316/337/392, wherein the amino acid positions of said polypeptide sequence are numbered with reference to SEQ ID NO: 374. In some embodiments, the recombinant alpha galactosidase A comprises a polypeptide sequence having at least 85%, 86%, 87%, 88%, 89%, 90%, 91%, 92%, 93%, 94%, 95%, 96%, 97%, 98%, 99%, or more sequence identity to SEQ ID NO: 374, or a functional fragment thereof, and wherein said recombinant alpha galactosidase A comprises at least one substitution or substitution set at one or more positions selected from 10T/36M/92Y/166S/247N/261A/316L/392M, 10T/39M, 10T/39M/44L/47S/92Y/206K/217F, 10T/39M/44L/47S/316L, 10T/39M/44L/47S/337A, 10T/39M/44L/92Y/166S/261A/316L/322M, 10T/39M/44L/92Y/166S/302Q/322M, 10T/39M/44L/92Y/166S/392M, 10T/39M/44L/92Y/217F/302Q/322M, 10T/39M/44L/92Y/302Q/322M, 10T/39M/44L/166S/261A/271H/316L/322M, 10T/39M/44L/392M, 10T/39M/47S/92Y/337A, 10T/39M/92Y/131G/166S/271H/316L/322M, 10T/39M/92Y/166S/217F/247N/271H, 10T/39M/92Y/217F/316L, 10T/44L/47S/166S/261A/271H, 10T/44L/47S/166S/271H/322M/368W, 10T/44L/47S/217F/271H/316L/322M, 10T/44L/92Y, 10T/44L/92Y/217F/247N/271H/302Q/316L/392M, 10T/44L/166S/302Q, 10T/44L/206K/316L/322M, 10T/47S/92 Y/166S/271H/316L/337A, 10T/47S/92Y/271H/302Q, 10T/47S/92Y/316L/322M/392M, 10T/47S/166S/271H, 10T/47S/166S/316L, 10T/92Y/166S, 10T/92Y/166S/217F/247N/261A/271H, 10T/92Y/166S/261A/271H/392M, 10T/92Y/166S/261A/316L/322M/337A, 10T/92Y/166S/337A/368W, 10T/92Y/302Q/337A, 10T/92Y/316L/322M, 10T/206K, 10T/206K/247N/261A, 10T/217F/322M, 10T/261A, 10T/261A/337A/392M, 10T/316L/392M, 10T/368W, 39M/44L/47S/92Y/166S/206K/392M, 39M/44L/47S/92Y/206K/247N/261A, 39M/44L/47S/92Y/206K/392M, 39M/44L/47S/206K/337A/368W/392M, 39M/44L/92Y/166S/247N/261A/302Q/337A, 39M/44L/166S/271H, 39M/44L/166S/271H/337A/368W/392M, 39M/47S/92Y/316L/322M, 39M/47S/92Y/392M, 39M/47S/166S/217F/261A/392M, 39M/47S/217F/247N/368W, 39M/47S/247N, 39M/92Y/166S/217F/392M, 39M/92Y/261A/302Q, 39M/166S/217F/261A/316L/368W, 39M/322M, 39M/392M, 44L/47S, 44L/47S/92Y/217F/271H, 44L/47S/92Y/217F/316L/322M/392M, 44L/47S/92Y/392M, 44L/47S/166S, 44L/47S/166S/271H, 44L/47S/247N/271H/392M, 44L/316L/322M/392M, 44L/337A, 47S/166S/206K/217F/247N/337A, 47S/166S/217F/271H/337A, 47S/206K, 47S/217F/247N/261A, 47S/271H, 52N/217F/302Q/316L, 92Y/166S/206K/271H/316L, 92Y/166S/217F/261A/271H/392M, 92Y/166S/217F/316L/337A/392M, 92Y/166S/247N, 92Y/166S/316L, 92Y/206K/322M, 92Y/217F, 92Y/217F/271H/337A, 92Y/261A/271H, 92Y/271H, 166S/217F/316L/322M/337A, 166S/247N/271H/316L, 166S/316L/322M/337A, 206K/217F, 217F/392M, 247N/316L, 316L/322M/368W, and 316L/337A/392M, wherein the amino acid positions of said polypeptide sequence are numbered with reference to SEQ ID NO: 374. In some embodiments, the recombinant alpha galactosidase A comprises a polypeptide sequence having at least 85%, 86%, 87%, 88%, 89%, 90%, 91%, 92%, 93%, 94%, 95%, 96%, 97%, 98%, 99%, or more sequence identity to SEQ ID NO: 374, or a functional fragment thereof, and wherein said recombinant alpha galactosidase A comprises at least one substitution or substitution set at one or more positions selected from P10T/K36M/H92Y/P166S/D247N/G261A/D316L/T392M, P10T/E39M, P10T/E39M/R44L/T47S/H92Y/A206K/R217F, P10T/E39M/R44L/T47S/D316L, P10T/E39M/R44L/T47S/P337A, P10T/E39M/R44L/H92Y/P166S/G261A/D316L/I322M, P10T/E39M/R44L/H92Y/P166S/K302Q/I322M, P10T/E39M/R44L/H92Y/P166S/T392M, P10T/E39M/R44L/H92Y/R217F/K302Q/I322M, P10T/E39M/R44L/H92Y/K302Q/I322M, P10T/E39M/R44L/P166S/G261A/A271H/D316L/I322M, P10T/E39M/R44L/T392M, P10T/E39M/T47S/H92Y/P337A, P10T/E39M/H92Y/W131G/P166S/A271H/D316L/I322M, P10T/E39M/H92Y/P166S/R217F/D247N/A271H, P10T/E39M/H92Y/R217F/D316L, P10T/R44L/T47S/P166S/G261A/A271H, P10T/R44L/T47S/P166S/A271H/I322M/A368W, P10T/R44L/T47S/R217F/A271H/D316L/I322M, P10T/R44L/H92Y, P10T/R44L/H92Y/R217F/D247N/A271H/K302Q/D316L/T392M, P10T/R44L/P166S/K302Q, P10T/R44L/A206K/D316L/I322M, P10T/T47S/H92Y/P166S/A271H/D316L/P337A, P10T/T47S/H92Y/A271H/K302Q, P10T/T47S/H92Y/D316L/I322M/T392M, P10T/T47S/P166S/A271H, P10T/T47S/P166S/D316L, P10T/H92Y/P166S, P10T/H92Y/P166S/R217F/D247N/G261A/A271H, P10T/H92Y/P166S/G261A/A271H/T392M, P10T/H92Y/P166S/G261A/D316L/I322M/P337A, P10T/H92Y/P166S/P337A/A368W, P10T/H92Y/K302Q/P337A, P10T/H92Y/D316L/I322M, P10T/A206K, P10T/A206K/D247N/G261A, P10T/R217F/I322M, P10T/G261A, P10T/G261A/P337A/T392M, P10T/D316L/T392M, P10T/A368W, E39M/R44L/T47S/H92Y/P166S/A206K/T392M, E39M/R44L/T47S/H92Y/A206K/D247N/G261A, E39M/R44L/T47S/H92Y/A206K/T392M, E39M/R44L/T47S/A206K/P337A/A368W/T392M, E39M/R44L/H92Y/P166S/D247N/G261A/K302Q/P337A, E39M/R44L/P166S/A271H, E39M/R44L/P166S/A271H/P337A/A368W/T392M, E39M/T47S/H92Y/D316L/1322M, E39M/T47S/H92Y/T392M, E39M/T47S/P166S/R217F/G261A/T392M, E39M/T47S/R217F/D247N/A368W, E39M/T47S/D247N, E39M/H92Y/P166S/R217F/T392M, E39M/H92Y/G261A/K302Q, E39M/P166S/R217F/G261A/D316L/A368W, E39M/I322M, E39M/T392M, R44L/T47S, R44L/T47S/H92Y/R217F/A271H, R44L/T47S/H92Y/R217F/D316L/1322M/T392M, R44L/T47S/H92Y/T392M, R44L/T47S/P166S, R44L/T47S/P166S/A271H, R44L/T47S/D247N/A271H/T392M, R44L/D316L/1322M/T392M, R44L/P337A, T47S/P166S/A206K/R217F/D247N/P337A, T47S/P166S/R217F/A271H/P337A, T47S/A206K, T47S/R217F/D247N/G261A, T47S/A271H, D52N/R217F/K302Q/D316L, H92Y/P166S/A206K/A271H/D316L, H92Y/P166S/R217F/G261A/A271H/T392M, H92Y/P166S/R217F/D316L/P337A/T392M, H92Y/P166S/D247N, H92Y/P166S/D316L, H92Y/A206K/I322M, H92Y/R217F, H92Y/R217F/A271H/P337A, H92Y/G261A/A271H, H92Y/A271H, P166S/R217F/D316L/1322M/P337A, P166S/D247N/A271H/D316L, P166S/D316L/1322M/P337A, A206K/R217F, R217F/T392M, D247N/D316L, D316L/I322M/A368W, and D316L/P337A/T392M, wherein the amino acid positions of said polypeptide sequence are numbered with reference to SEQ ID NO: 374.

[0125] The present invention also provides recombinant alpha galactosidase A wherein said comprises a polypeptide sequence having at least 85%, 86%, 87%, 88%, 89%, 90%, 91%, 92%, 93%, 94%, 95%, 96%, 97%, 98%, 99%, or more sequence identity to SEQ ID NO: 704, or a functional fragment thereof, and wherein said recombinant alpha galactosidase A comprises at least one substitution or substitution set at one or more positions selected from 2, 4, 5, 24/59, 24/143/144, 24/143/202/333, 24/143/202/352/390/391, 24/143/333/352/387/390/391, 24/143/390/391, 24/202, 24/202/271, 24/202/333/352, 24/271/352, 24/352/387/390/391, 24/387/391, 31, 40, 59, 59/143, 59/143/202, 59/143/202/271/333, 59/143/271, 59/143/333, 59/202, 59/202/333, 59/271/387/390, 73, 76, 80, 83, 84, 91/215/361, 122, 123, 143, 143/202, 143/271, 143/271/352/390, 143/333, 143/333/387/390, 143/387/391, 147, 155, 164, 165, 179, 186, 202, 202/333, 210, 215/218, 218, 218/361, 218/361/398, 218/398, 246, 254/398, 271, 271/333, 271/333/390/391, 271/333/391, 271/352/391, 273, 275, 277, 278, 280, 281, 283, 284, 287, 300, 303, 304, 325, 331, 332, 333/352, 333/390/391, 333/391, 334, 335, 336, 338, 339, 340, 341, 343, 359, 360, 361, 362, 367, 369, 371, 373, 375, 377, 382, 382/398, 385, 387/391, 390, and 398, wherein the amino acid positions of said polypeptide sequence are numbered with reference to SEQ ID NO: 704. In some embodiments, the recombinant alpha galactosidase A comprises a polypeptide sequence having at least 85%, 86%, 87%, 88%, 89%, 90%, 91%, 92%, 93%, 94%, 95%, 96%, 97%, 98%, 99%, or more sequence identity to SEQ ID NO: 704, or a functional fragment thereof, and wherein said recombinant alpha galactosidase A comprises at least one substitution or substitution set at one or more positions selected from 2S, 4L, 5M, 5V, 24S/59A, 24S/143S/144N, 24S/143S/202N/333N, 24S/143S/202N/352N/390N/391N, 24S/143S/333N/352N/387N/390T/391N, 24S/143S/390T/391N, 24S/202N, 24S/202N/271N, 24S/202N/333N/352N, 24S/271N/352N, 24S/352N/387N/390N/391N, 24S/387N/391N, 31F, 31H, 31L, 31T, 31W, 40Q, 59A, 59A/143S, 59A/143S/271N, 59A/202N, 59T, 59T/143S/202N, 59T/143S/333N, 59T/202N/333N, 59V/143S/202N/271N/333N, 59V/271N/387N/390T, 73A, 76A, 76F, 76M, 76S, 80T, 83R, 83S, 84G, 84K, 84R, 91S/215S/361T, 122E, 122N, 122S, 123Q, 123R, 123S, 123T, 143S, 143S/202N, 143S/271N, 143S/271N/352N/390N, 143S/333N, 143S/333N/387N/390T, 143S/387N/391N, 147L, 147S, 155A, 155D, 155F, 155L, 155R, 155T, 164E, 1651, 179H, 179L, 179R, 179W, 186E, 186F, 186M, 186P, 186R, 186S, 186Y, 202N, 202N/333N, 2101, 215S/218Y, 218Y, 218Y/361T, 218Y/361T/398F, 218Y/398F, 246Y, 254T/398F, 271N, 271N/333N, 271N/333N/390N/391N, 271N/333N/391N, 271N/352N/391N, 273L, 275A, 275G, 277Q, 277V, 278N, 278R, 278S, 280G, 2811, 281M, 283L, 283P, 283T, 283V, 284A, 284E, 284G, 284L, 284M, 284R, 284S, 287R, 300F, 303A, 303C, 303W, 304T, 304V, 304W, 325A, 331M, 332G, 332H, 333N/352N, 333N/390N/391N, 333N/390S/391N, 333N/391N, 334C, 334V, 335A, 335L, 336F, 336G, 336S, 336T, 338L, 339G, 339N, 339Q, 339V, 340H, 340I, 340K, 340M, 340P, 340W, 341F, 341M, 343L, 343R, 343S, 343W, 359F, 359L, 359R, 360H, 360V, 361T, 361V, 362H, 367A, 367D, 367L, 367M, 369D, 371G, 373L, 373S, 375L, 375Q, 377Q, 382I, 382I/398F, 385R, 387N/391N, 390S, and 398F, wherein the amino acid positions of said polypeptide sequence are numbered with reference to SEQ ID NO: 704. In some embodiments, the recombinant alpha galactosidase A comprises a polypeptide sequence having at least 85%, 86%, 87%, 88%, 89%, 90%, 91%, 92%, 93%, 94%, 95%, 96%, 97%, 98%, 99%, or more sequence identity to SEQ ID NO: 704, or a functional fragment thereof, and wherein said recombinant alpha galactosidase A comprises at least one substitution or substitution set at one or more positions selected from D2S, G4L, LSM, LSV, D24S/C59A, D24S/C143S/D144N, D24S/C143S/D202N/G333N, D24S/C143S/D202N/F352N/M390N/Q391N, D24S/C143S/G333N/F352N/E387N/M390T/Q391N, D24S/C143S/M390T/Q391N, D24S/D202N, D24S/D202N/A271N, D24S/D202N/G333N/F352N, D24S/A271N/F352N, D24S/F352N/E387N/M390N/Q391N, D24S/E387N/Q391N, S31F, S31H, S31L, S31T, S31W, E40Q, C59A, C59A/C143S, C59A/C143S/A271N, C59A/D202N, C59T, C59T/C143S/D202N, C59T/C143S/G333N, C59T/D202N/G333N, C59V/C143S/D202N/A271N/G333N, C59V/A271N/E387N/M390T, G73A, Q76A, Q76F, Q76M, Q76S, Q80T, P83R, P83S, H84G, H84K, H84R, N91S/T215S/R361T, D122E, D122N, D122S, I123Q, I123R, I123S, I123T, C143S, C143S/D202N, C143S/A271N, C143S/A271N/F352N/M390N, C143S/G333N, C143S/G333N/E387N/M390T, C143S/E387N/Q391N, E147L, E147S, H155A, H155D, H155F, H155L, H155R, H155T, G164E, R1651, P179H, P179L, P179R, P179W, T186E, T186F, T186M, T186P, T186R, T186S, T186Y, D202N, D202N/G333N, S210I, T215S/N218Y, N218Y, N218Y/R361T, N218Y/R361T/L398F, N218Y/L398F, W246Y, A254T/L398F, A271N, A271N/G333N, A271N/G333N/M390N/Q391N, A271N/G333N/Q391N, A271N/F352N/Q391N, S273L, Q275A, Q275G, K277Q, K277V, A278N, A278R, A278S, L280G, Q281I, Q281M, K283L, K283P, K283T, K283V, D284A, D284E, D284G, D284L, D284M, D284R, D284S, A287R, L300F, G303A, G303C, G303W, D304T, D304V, D304W, R325A, P331M, R332G, R332H, G333N/F352N, G333N/M390N/Q391N, G333N/M390S/Q391N, G333N/Q391N, Y334C, Y334V, T335A, T335L, I336F, I336G, I336S, I336T, V338L, A339G, A339N, A339Q, A339V, S340H, S340I, S340K, S340M, S340P, S340W, L341F, L341M, K343L, K343R, K343S, K343W, V359F, V359L, V359R, K360H, K360V, R361T, R361V, K362H, E367A, E367D, E367L, E367M, T369D, R371G, R373L, R373S, H375L, H375Q, N377Q, V382I, V382I/L398F, Q385R, E387N/Q391N, M390S, and L398F, wherein the amino acid positions of said polypeptide sequence are numbered with reference to SEQ ID NO: 704.

[0126] The present invention also provides recombinant alpha galactosidase A wherein said comprises a polypeptide sequence having at least 85%, 86%, 87%, 88%, 89%, 90%, 91%, 92%, 93%, 94%, 95%, 96%, 97%, 98%, 99%, or more sequence identity to SEQ ID NO: 374, or a functional fragment thereof, and wherein said recombinant alpha galactosidase A comprises at least one substitution or substitution set at one or more positions selected from 10, 39, 44, 47, 92, 166, 206, 217, 247, 261, 271, 302, 316, 322, 337, 368, and 392, wherein the amino acid positions of said polypeptide sequence are numbered with reference to SEQ ID NO: 374. In some embodiments, the recombinant alpha galactosidase A comprises a polypeptide sequence having at least 85%, 86%, 87%, 88%, 89%, 90%, 91%, 92%, 93%, 94%, 95%, 96%, 97%, 98%, 99%, or more sequence identity to SEQ ID NO: 374, or a functional fragment thereof, and wherein said recombinant alpha galactosidase A comprises at least one substitution or substitution set at one or more positions selected from 10A, 10C, 10D, 10E, 10F, 10G, 10H, 10I, 10K, 10L, 10M, 10N, 10Q, 10R, 10S, 10T, 10V, 10W, 10Y, 39A, 39C, 39D, 39F, 39G, 39H, 39I, 39K, 39L, 39M, 39N, 39P, 39Q, 39R, 39S, 39T, 39V, 39W, 39Y, 44A, 44C, 44D, 44E, 44F, 44G, 44H, 44I, 44K, 44L, 44N, 44P, 44Q, 44S, 44T, 44V, 44W, 44Y, 47A, 47C, 47D, 47E, 47F, 47G, 47H, 47I, 47K, 47L, 47M, 47N, 47P, 47Q, 47R, 47S, 47V, 47W, 47Y, 92A, 92C, 92D, 92E, 92F, 92G, 92I, 92K, 92L, 92M, 92N, 92P, 92Q, 92R, 92S, 92T, 92V, 92W, 92Y, 166A, 166C, 166D, 166E, 166F, 166G, 166H, 166I, 166K, 166L, 166M, 166N, 166Q, 166R, 166S, 166T, 166V, 166W, 166Y, 206C, 206D, 206E, 206F, 206G, 206H, 206I, 206K, 206L, 206M, 206N, 206P, 206Q, 206R, 206S, 206T, 206V, 206W, 206Y, 217A, 217C, 217D, 217E, 217F, 217G, 217H, 217I, 217K, 217L, 217M, 217N, 217P, 217Q, 217S, 217T, 217V, 217W, 217Y, 247A, 247C, 247E, 247F, 247G, 247H, 247I, 247K, 247L, 247M, 247N, 247P, 247Q, 247R, 247S, 247T, 247V, 247W, 247Y, 261A, 261C, 261D, 261E, 261F, 261H, 261I, 261K, 261L, 261M, 261N, 261P, 261Q, 261R, 261S, 261T, 261V, 261W, 261Y, 271C, 271D, 271E, 271F, 271G, 271H, 271I, 271K, 271L, 271M, 271N, 271P, 271Q, 271R, 271S, 271T, 271V, 271W, 271Y, 302A, 302C, 302D, 302E, 302F, 302G, 302H, 302I, 302L, 302M, 302N, 302P, 302Q, 302R, 302S, 302T, 302V, 302W, 302Y, 316A, 316C, 316E, 316F, 316G, 316H, 316I, 316K, 316L, 316M, 316N, 316P, 316Q, 316R, 316S, 316T, 316V, 316W, 316Y, 322A, 322C, 322D, 322E, 322F, 322G, 322H, 322K, 322L, 322M, 322N, 322P, 322Q, 322R, 322S, 322T, 322V, 322W, 322Y, 337A, 337C, 337D, 337E, 337F, 337G, 337H, 337I, 337K, 337L, 337M, 337N, 337Q, 337R, 337S, 337T, 337V, 337W, 337Y, 368C, 368D, 368E, 368F, 368G, 368H, 368I, 368K, 368L, 368M, 368N, 368P, 368Q, 368R, 368S, 368T, 368V, 368W, 368Y, 392A, 392C, 392D, 392E, 392F, 392G, 392H, 392I, 392K, 392L, 392M, 392N, 392P, 392Q, 392R, 392S, 392V, 392W, and 392Y, wherein the amino acid positions of said polypeptide sequence are numbered with reference to SEQ ID NO: 374. In some embodiments, the recombinant alpha galactosidase A comprises a polypeptide sequence having at least 85%, 86%, 87%, 88%, 89%, 90%, 91%, 92%, 93%, 94%, 95%, 96%, 97%, 98%, 99%, or more sequence identity to SEQ ID NO: 374, or a functional fragment thereof, and wherein said recombinant alpha galactosidase A comprises at least one substitution or substitution set at one or more positions selected from P10A, P10C, P10D, P10E, P10F, P10G, P10H, P10I, P10K, P10L, P10M, P10N, P10Q, P10R, P10S, P10T, P10V, P10W, P10Y, E39A, E39C, E39D, E39F, E39G, E39H, E39I, E39K, E39L, E39M, E39N, E39P, E39Q, E39R, E39S, E39T, E39V, E39W, E39Y, R44A, R44C, R44D, R44E, R44F, R44G, R44H, R441, R44K, R44L, R44N, R44P, R44Q, R44S, R44T, R44V, R44W, R44Y, T47A, T47C, T47D, T47E, T47F, T47G, T47H, T471, T47K, T47L, T47M, T47N, T47P, T47Q, T47R, T47S, T47V, T47W, T47Y, H92A, H92C, H92D, H92E, H92F, H92G, H921, H92K, H92L, H92M, H92N, H92P, H92Q, H92R, H92S, H92T, H92V, H92W, H92Y, P166A, P166C, P166D, P166E, P166F, P166G, P166H, P1661, P166K, P166L, P166M, P166N, P166Q, P166R, P166S, P166T, P166V, P166W, P166Y, A206C, A206D, A206E, A206F, A206G, A206H, A2061, A206K, A206L, A206M, A206N, A206P, A206Q, A206R, A206S, A206T, A206V, A206W, A206Y, R217A, R217C, R217D, R217E, R217F, R217G, R217H, R217I, R217K, R217L, R217M, R217N, R217P, R217Q, R217S, R217T, R217V, R217W, R217Y, D247A, D247C, D247E, D247F, D247G, D247H, D2471, D247K, D247L, D247M, D247N, D247P, D247Q, D247R, D247S, D247T, D247V, D247W, D247Y, G261A, G261C, G261D, G261E, G261F, G261H, G2611, G261K, G261L, G261M, G261N, G261P, G261Q, G261R, G261S, G261T, G261V, G261W, G261Y, A271C, A271D, A271E, A271F, A271G, A271H, A2711, A271K, A271L, A271M, A271N, A271P, A271Q, A271R, A271S, A271T, A271V, A271W, A271Y, K302A, K302C, K302D, K302E, K302F, K302G, K302H, K3021, K302L, K302M, K302N, K302P, K302Q, K302R, K302S, K302T, K302V, K302W, K302Y, D316A, D316C, D316E, D316F, D316G, D316H, D3161, D316K, D316L, D316M, D316N, D316P, D316Q, D316R, D316S, D316T, D316V, D316W, D316Y, I322A, I322C, I322D, 1322E, I322F, I322G, I322H, 1322K, I322L, I322M, I322N, I322P, I322Q, I322R, 1322S, I322T, I322V, 1322W, I322Y, P337A, P337C, P337D, P337E, P337F, P337G, P337H, P3371, P337K, P337L, P337M, P337N, P337Q, P337R, P337S, P337T, P337V, P337W, P337Y, A368C, A368D, A368E, A368F, A368G, A368H, A3681, A368K, A368L, A368M, A368N, A368P, A368Q, A368R, A368S, A368T, A368V, A368W, A368Y, T392A, T392C, T392D, T392E, T392F, T392G, T392H, T3921, T392K, T392L, T392M, T392N, T392P, T392Q, T392R, T392S, T392V, T392W, and T392Y, wherein the amino acid positions of said polypeptide sequence are numbered with reference to SEQ ID NO: 374.

[0127] The present invention also provides recombinant alpha galactosidase A wherein said comprises a polypeptide sequence having at least 85%, 86%, 87%, 88%, 89%, 90%, 91%, 92%, 93%, 94%, 95%, 96%, 97%, 98%, 99%, or more sequence identity to SEQ ID NO: 1022, or a functional fragment thereof, and wherein said recombinant alpha galactosidase A comprises at least one substitution or substitution set at one or more positions selected from 10, 10/392, 31, 31/39/44/166/302, 31/47, 31/283/284, 39, 39/44, 39/44/47, 39/44/47/261/283/284, 39/44/283, 39/44/339, 39/47/261, 39/92, 39/206, 39/284, 44, 44/284/302, 84, 84/92, 84/284/302/392, 84/316, 84/368/392, 92, 92/206/217, 92/206/275, 92/206/284, 92/206/302/368, 92/271, 92/271/277, 92/275/284, 92/283, 92/283/392, 92/284, 92/302, 92/316, 92/368, 155, 155/217, 155/368, 166, 166/283/284, 166/302, 206, 206/217, 206/334, 261, 261/283, 271, 271/368, 275, 283, 283/284, 283/392, 284, 302, 316, 334, 339, 368, 368/392, and 392, wherein the amino acid positions of said polypeptide sequence are numbered with reference to SEQ ID NO: 1022. In some embodiments, the recombinant alpha galactosidase A comprises a polypeptide sequence having at least 85%, 86%, 87%, 88%, 89%, 90%, 91%, 92%, 93%, 94%, 95%, 96%, 97%, 98%, 99%, or more sequence identity to SEQ ID NO: 1022, or a functional fragment thereof, and wherein said recombinant alpha galactosidase A comprises at least one substitution or substitution set at one or more positions selected from P10G, P10G/T392D, S31T, S31T/E39V/R44V/P166D/K302Y, S31T/T47R, S31T/K283L/D284A, E39L, E39L/H92V, E39L/A206E, E39L/D284S, E39V/R44V, E39V/R44V/T47R, E39V/R44V/T47R/G261S/K283L/D284A, E39V/R44V/K283T, E39V/R44V/A339N, E39V/T47R/G261S, R44V, R44V/D284E/K302Y, H84K, H84K/H92V, H84K/D284S/K302L/T392A, H84K/D316H, H84K/A368E/T392A, H92Q, H92T, H92T/A206E/R217N, H92T/A206E/K302T/A368E, H92T/A271K, H92T/A271K/K277R, H92T/K283P, H92T/K283V/T392W, H92T/D284M, H92T/K302L, H92T/A368E, H92V, H92V/A206E/D284S, H92V/A206Y/Q275A, H92V/Q275A/D284S, H92V/D284S, H92V/K302L, H92V/D316H, H155F, H155F/R2171, H155F/A368E, P166D, P166D/K283L/D284A, P166D/K302Y, A206E, A206E/R217N, A206I, A206Q, A206T/Y334C, A206Y, G261S, G261S/K283L, A271K, A271K/A368E, Q275A, K283L, K283P/T392W, K283T, K283T/D284E, D284E, D284M, D284S, K302L, K302Y, D316H, Y334C, A339N, A368E, A368E/T392W, T392A, T392D, and T392W, wherein the amino acid positions of said polypeptide sequence are numbered with reference to SEQ ID NO: 1022. In some embodiments, the recombinant alpha galactosidase A comprises a polypeptide sequence having at least 85%, 86%, 87%, 88%, 89%, 90%, 91%, 92%, 93%, 94%, 95%, 96%, 97%, 98%, 99%, or more sequence identity to SEQ ID NO: 1022, or a functional fragment thereof, and wherein said recombinant alpha galactosidase A comprises at least one substitution or substitution set at one or more positions selected from 10G, 10G/392D, 31T, 31T/39V/44V/166D/302Y, 31T/47R, 31T/283L/284A, 39L, 39L/92V, 39L/206E, 39L/284S, 39V/44V, 39V/44V/47R, 39V/44V/47R/261S/283L/284A, 39V/44V/283T, 39V/44V/339N, 39V/47R/261S, 44V, 44V/284E/302Y, 84K, 84K/92V, 84K/284S/302L/392A, 84K/316H, 84K/368E/392A, 92Q, 92T, 92T/206E/217N, 92T/206E/302T/368E, 92T/271K, 92T/271K/277R, 92T/283P, 92T/283V/392W, 92T/284M, 92T/302L, 92T/368E, 92V, 92V/206E/284S, 92V/206Y/275A, 92V/275A/284S, 92V/284S, 92V/302L, 92V/316H, 155F, 155F/2171, 155F/368E, 166D, 166D/283L/284A, 166D/302Y, 206E, 206E/217N, 2061, 206Q, 206T/334C, 206Y, 261S, 261S/283L, 271K, 271K/368E, 275A, 283L, 283P/392W, 283T, 283T/284E, 284E, 284M, 284S, 302L, 302Y, 316H, 334C, 339N, 368E, 368E/392W, 392A, 392D, and 392W, wherein the amino acid positions of said polypeptide sequence are numbered with reference to SEQ ID NO: 1022.

[0128] In some embodiments, the recombinant alpha galactosidase A polypeptide sequence has at least 85%, 86%, 87%, 88%, 89%, 90%, 91%, 92%, 93%, 94%, 95%, 96%, 97%, 98%, 99% or more sequence identity to the even-numbered sequences of SEQ ID NOS: 4-1864.

[0129] In some embodiments, the engineered GLA polypeptide comprises a functional fragment of an engineered GLA polypeptide encompassed by the invention. Functional fragments have at least 80%, 81%, 82%, 83%, 84%, 85%, 86%, 87%, 88%, 89%, 90%, 91%, 92%, 93%, 94%, 95%, 96%, 97%, 98%, or 99% of the activity of the engineered GLA polypeptide from which is was derived (i.e., the parent engineered GLA). A functional fragment comprises at least 80%, 81%, 82%, 83%, 84%, 85%, 86%, 87%, 88%, 89%, 90%, 91%, 92%, 93%, 94%, 95%, 96%, 97%, 98% and even 99% of the parent sequence of the engineered GLA. In some embodiments the functional fragment is truncated by less than 5, less than 10, less than 15, less than 10, less than 25, less than 30, less than 35, less than 40, less than 45, and less than 50 amino acids.

[0130] Polynucleotides Encoding Engineered Polypeptides, Expression Vectors and Host Cells:

[0131] The present invention provides polynucleotides encoding the engineered GLA polypeptides described herein. In some embodiments, the polynucleotides are operatively linked to one or more heterologous or homologous regulatory sequences that control gene expression to create a recombinant polynucleotide capable of expressing the polypeptide. Expression constructs containing a heterologous polynucleotide encoding the engineered GLA polypeptides can be introduced into appropriate host cells to express the corresponding GLA polypeptide.

[0132] As will be apparent to the skilled artisan, availability of a protein sequence and the knowledge of the codons corresponding to the various amino acids provide a description of all the polynucleotides capable of encoding the subject polypeptides. The degeneracy of the genetic code, where the same amino acids are encoded by alternative or synonymous codons, allows an extremely large number of nucleic acids to be made, all of which encode the engineered GLA polypeptide. Thus, having knowledge of a particular amino acid sequence, those skilled in the art could make any number of different nucleic acids by simply modifying the sequence of one or more codons in a way which does not change the amino acid sequence of the protein. In this regard, the present invention specifically contemplates each and every possible variation of polynucleotides that could be made encoding the polypeptides described herein by selecting combinations based on the possible codon choices, and all such variations are to be considered specifically disclosed for any polypeptide described herein, including the variants provided in Tables 2-1, 5-1, 6-1, 7-1, 8-1, 9-1, 11-1, 12-1, and/or 13-1.

[0133] In various embodiments, the codons are preferably selected to fit the host cell in which the protein is being produced. For example, preferred codons used in bacteria are used for expression in bacteria. Consequently, codon optimized polynucleotides encoding the engineered GLA polypeptides contain preferred codons at about 40%, 50%, 60%, 70%, 80%, or greater than 90% of codon positions of the full length coding region. In some embodiments, the present invention provides recombinant polynucleotide sequences in which the codons are optimized for expression in human cells or tissues.

[0134] In some embodiments, the present invention provides a recombinant polynucleotide sequence having at least about 85%, about 86%, about 87%, about 88%, about 89%, about 90%, about 91%, about 92%, about 93%, about 94%, about 95%, about 96%, about 97%, about 98%, about 99%, or more sequence identity to SEQ ID NO: 1. In some embodiments, the present invention provides a recombinant polynucleotide sequence having at least 85%, 86%, 87%, 88%, 89%, 90%, 91%, 92%, 93%, 94%, 95%, 96%, 97%, 98%, 99%, or more sequence identity to SEQ ID NO: 1. In some embodiments, the present invention provides a recombinant polynucleotide sequence having at least about 85%, about 86%, about 87%, about 88%, about 89%, about 90%, about 91%, about 92%, about 93%, about 94%, about 95%, about 96%, about 97%, about 98%, about 99%, or more sequence identity to SEQ ID NO: 7. In some embodiments, the present invention provides a recombinant polynucleotide sequence having at least 85%, 86%, 87%, 88%, 89%, 90%, 91%, 92%, 93%, 94%, 95%, 96%, 97%, 98%, 99%, or more sequence identity to SEQ ID NO: 7. In some embodiments, the recombinant polynucleotide sequence has at least 85%, 86%, 87%, 88%, 89%, 90%, 91%, 92%, 93%, 94%, 95%, 96%, 97%, 98%, 99% or more sequence identity to the odd-numbered sequences of SEQ ID NOS: 3-1863.

[0135] In some embodiments, the polynucleotide encodes a recombinant alpha galactosidase A comprising a polypeptide sequence having at least 85%, 86%, 87%, 88%, 89%, 90%, 91%, 92%, 93%, 94%, 95%, 96%, 97%, 98%, 99%, or more sequence identity to SEQ ID NO: 8, or a functional fragment thereof, and wherein said recombinant alpha galactosidase A comprises at least one substitution or substitution set at one or more positions selected from 44, 44/217, 44/217/316, 44/217/322, 44/217/322/337, 44/247, 44/247/302, 44/247/302/322, 44/247/322, 44/247/337, 44/247/362, 44/302, 44/337, 44/373, 217/322, 217/373, 247/322, 247/362, 302/322/362/373, 302/337, 316, 316/337, 322, 322/337, 362/373, and 373, wherein the amino acid positions of said polypeptide sequence are numbered with reference to SEQ ID NO: 8. In some embodiments, the polynucleotide encodes a recombinant alpha galactosidase A comprising a polypeptide sequence having at least 85%, 86%, 87%, 88%, 89%, 90%, 91%, 92%, 93%, 94%, 95%, 96%, 97%, 98%, 99%, or more sequence identity to SEQ ID NO: 8, or a functional fragment thereof, and wherein said recombinant alpha galactosidase A comprises at least one substitution or substitution set at one or more positions selected from 44L, 44L/217F, 44L/217F/316L, 44L/217F/322M, 44L/217F/322M/337A, 44L/247N, 44L/247N/302Q, 44L/247N/302Q/322M, 44L/247N/322M, 44L/247N/337A, 44L/247N/362K, 44L/302Q, 44L/337A, 44L/373R, 217F/322M, 217F/373R, 247N/322M, 247N/362K, 302Q/322M/362K/373R, 302Q/337A, 316L, 316L/337A, 322M, 322M/337A, 362K/373R, and 373R, wherein the amino acid positions of said polypeptide sequence are numbered with reference to SEQ ID NO: 8. In some embodiments, the polynucleotide encodes a recombinant alpha galactosidase A comprising a polypeptide sequence having at least 85%, 86%, 87%, 88%, 89%, 90%, 91%, 92%, 93%, 94%, 95%, 96%, 97%, 98%, 99%, or more sequence identity to SEQ ID NO: 8, or a functional fragment thereof, wherein said recombinant alpha galactosidase A comprises at least one substitution or substitution set at one or more positions selected from R44L, R44L/R217F, R44L/R217F/D316L, R44L/R217F/I322M, R44L/R217F/I322M/P337A, R44L/D247N, R44L/D247N/K302Q, R44L/D247N/K302Q/I322M, R44L/D247N/I322M, R44L/D247N/P337A, R44L/D247N/Q362K, R44L/K302Q, R44L/P337A, R44L/K373R, R217F/I322M, R217F/K373R, D247N/I322M, D247N/Q362K, K302Q/I322M/Q362K/K373R, K302Q/P337A, D316L, D316L/P337A, I322M, I322M/P337A, Q362K/K373R, and K373R, wherein the amino acid positions of said polypeptide sequence are numbered with reference to SEQ ID NO: 8.

[0136] In some embodiments, the polynucleotide encodes a recombinant alpha galactosidase A comprising a polypeptide sequence having at least 85%, 86%, 87%, 88%, 89%, 90%, 91%, 92%, 93%, 94%, 95%, 96%, 97%, 98%, 99%, or more sequence identity to SEQ ID NO: 8, or a functional fragment thereof, and wherein said recombinant alpha galactosidase A comprises at least one substitution or substitution set at one or more positions selected from 10/39/44/47/92/166/206/217/247/261/271/302/316/322/337/362/368/373/392, 44/217/316, 44/217/322/337, 166/362, 217/373, and 362/373, wherein the amino acid positions of said polypeptide sequence are numbered with reference to SEQ ID NO: 8. In some embodiments, the polynucleotide encodes a recombinant alpha galactosidase A comprising a polypeptide sequence having at least 85%, 86%, 87%, 88%, 89%, 90%, 91%, 92%, 93%, 94%, 95%, 96%, 97%, 98%, 99%, or more sequence identity to SEQ ID NO: 8, or a functional fragment thereof, wherein said recombinant alpha galactosidase A comprises at least one substitution or substitution set at one or more positions selected from 10T/39M/44L/47S/92 Y/166S/206K/217F/247N/261A/271H/302Q/316L/322M/337A/362K/368W/37 3R/392M, 44L/217F/316L, 44L/217F/322M/337A, 166A/362K, 217F/373R, and 362K/373R, wherein the amino acid positions of said polypeptide sequence are numbered with reference to SEQ ID NO: 8. In some embodiments, the polynucleotide encodes a recombinant alpha galactosidase A comprising a polypeptide sequence having at least 85%, 86%, 87%, 88%, 89%, 90%, 91%, 92%, 93%, 94%, 95%, 96%, 97%, 98%, 99%, or more sequence identity to SEQ ID NO: 8, or a functional fragment thereof, wherein said recombinant alpha galactosidase A comprises at least one substitution or substitution set at one or more positions selected from P10T/E39M/R44L/T47S/H92Y/P166S/A206K/R217F/D247N/G261A/A271H/K302Q/D316L/1322M/P337A/Q362K/A368W/K373R/T392M, R44L/R217F/D316L, R44L/R217F/1322M/P337A, P166A/Q362K, R217F/K373R, and Q362K/K373R, wherein the amino acid positions of said polypeptide sequence are numbered with reference to SEQ ID NO: 8.

[0137] In some embodiments, the present invention provides a recombinant polynucleotide sequence having at least about 85%, about 86%, about 87%, about 88%, about 89%, about 90%, about 91%, about 92%, about 93%, about 94%, about 95%, about 96%, about 97%, about 98%, about 99%, or more sequence identity to SEQ ID NO: 57. In some embodiments, the present invention provides a recombinant polynucleotide sequence having at least 85%, 86%, 87%, 88%, 89%, 90%, 91%, 92%, 93%, 94%, 95%, 96%, 97%, 98%, 99%, or more sequence identity to SEQ ID NO: 57. In some embodiments, the polynucleotide encodes a recombinant alpha galactosidase A, wherein said recombinant alpha galactosidase A comprises a polypeptide sequence having at least 85%, 86%, 87%, 88%, 89%, 90%, 91%, 92%, 93%, 94%, 95%, 96%, 97%, 98%, 99%, or more sequence identity to SEQ ID NO: 58, or a functional fragment thereof, and wherein said recombinant alpha galactosidase A comprises at least one substitution or substitution set at one or more positions selected from 7, 7/48/68, 7/48/68/120/282/299, 7/48/130/282, 7/48/180, 7/68/130/282/365, 7/68/180, 7/88/120/305/365, 7/120, 7/130, 7/282, 7/305, 7/305/365, 7/365, 39, 47, 47/87/95/96/158/162, 47/95, 47/273, 47/343, 48, 48/68, 48/180/282, 48/282, 48/282/305, 67/180, 68, 68/299/300, 71, 87/91/95/96/158/162, 87/91/95/96/206/343, 87/96/155/273/343, 88, 91/95, 91/95/96, 92, 93, 96, 96/273, 96/312/343, 120, 120/299/305, 151, 158, 158/162/273, 162, 162/273, 162/343, 166, 178, 180, 181, 206, 217, 271, 273, 273/343, 282, 282/365, 293/391, 299/300, 299/300/305/365, 300, 301, 305, 305/365, 314, 333, 336, 337, 343, 345, 363, 365, 370, 389, 393, 394, 396/398, 397, and 398, wherein the amino acid positions of said polypeptide sequence are numbered with reference to SEQ ID NO: 58. In some embodiments, the recombinant alpha galactosidase A comprises a polypeptide sequence having at least 85%, 86%, 87%, 88%, 89%, 90%, 91%, 92%, 93%, 94%, 95%, 96%, 97%, 98%, 99%, or more sequence identity to SEQ ID NO: 58, or a functional fragment thereof, and wherein said recombinant alpha galactosidase A comprises at least one substitution or substitution set at one or more positions selected from 7L, 7L/48D/68E, 7L/48D/68E/120H/282N/299R, 7L/48D/130E/282N, 7L/48D/180G, 7L/68E/130E/282N/365V, 7L/68E/180G, 7L/88A/120H/305G/365V, 7L/120H, 7L/130E, 7L/282N, 7L/305G, 7L/305G/365V, 7L/365V, 39V, 47D, 47D/87K/95E/96L/158R/162H, 47D/95E, 47D/273P, 47D/343G, 47V, 48D, 48D/68E, 48D/180G/282N, 48D/282N, 48D/282N/305G, 67T/180G, 68E, 68E/299R/300I, 71P, 87K/91Q/95E/96L/158A/162K, 87K/91Q/95E/96L/206S/343G, 87K/96I/155N/273P/343G, 88A, 91Q/95E, 91Q/95E/96L, 92F, 92T, 93I, 96L, 96L/273P, 96L/312Q/343G, 120H, 120H/299R/305G, 151L, 158A, 158A/162K/273G, 158R, 162H/343D, 162K, 162K/273P, 162S, 166K, 178G, 178S, 180G, 180L, 180T, 180V, 181A, 206K, 206S, 217K, 271R, 273P, 273P/343G, 282N, 282N/365V, 293P/391A, 299R/300I, 299R/300I/305G/365V, 300I, 301M, 305G, 305G/365V, 314A, 333F, 333G, 336V, 337R, 343D, 343G, 345A, 345Q, 363Q, 365A, 365Q, 365V, 370G, 389K, 393V, 394K, 396G/398T, 397A, 398A, 398P, 398S, and 398V, wherein the amino acid positions of said polypeptide sequence are numbered with reference to SEQ ID NO: 58. In some embodiments, the recombinant alpha galactosidase A comprises a polypeptide sequence having at least 85%, 86%, 87%, 88%, 89%, 90%, 91%, 92%, 93%, 94%, 95%, 96%, 97%, 98%, 99%, or more sequence identity to SEQ ID NO: 58, or a functional fragment thereof, and wherein said recombinant alpha galactosidase A comprises at least one substitution or substitution set at one or more positions selected from R7L, R7L/E48D/Q68E, R7L/E48D/Q68E/Y120H/D282N/Q299R, R7L/E48D/D130E/D282N, R7L/E48D/F180G, R7L/Q68E/D130E/D282N/F365V, R7L/Q68E/F180G, R7L/Q88A/Y120H/N305G/F365V, R7L/Y120H, R7L/D130E, R7L/D282N, R7L/N305G, R7L/N305G/F365V, R7L/F365V, E39V, T47D, T47D/R87K/595E/K96L/L158R/R162H, T47D/595E, T47D/S273P, T47D/K343G, T47V, E48D, E48D/Q68E, E48D/F180G/D282N, E48D/D282N, E48D/D282N/N305G, P67T/F180G, Q68E, Q68E/Q299R/L300I, S71P, R87K/N91Q/595E/K96L/L158A/R162K, R87K/N91Q/595E/K96L/A206S/K343G, R87K/K96I/H155N/5273P/K343G, Q88A, N91Q/595E, N91Q/595E/K96L, H92F, H92T, V93I, K96L, K96L/S273P, K96L/P312Q/K343G, Y120H, Y120H/Q299R/N305G, D151L, L158A, L158A/R162K/5273G, L158R, R162H/K343D, R162K, R162K/5273P, R162S, P166K, W178G, W178S, F180G, F180L, F180T, F180V, Q181A, A206K, A206S, R217K, A271R, S273P, S273P/K343G, D282N, D282N/F365V, L293P/Q391A, Q299R/L300I, Q299R/L300I/N305G/F365V, L300I, R301M, N305G, N305G/F365V, S314A, S333F, S333G, I336V, P337R, K343D, K343G, V345A, V345Q, L363Q, F365A, F365Q, F365V, 5370G, T389K, S393V, L394K, D396G/L398T, L397A, L398A, L398P, L398S, and L398V, wherein the amino acid positions of said polypeptide sequence are numbered with reference to SEQ ID NO: 58.

[0138] In some embodiments, the present invention provides a recombinant polynucleotide sequence having at least about 85%, about 86%, about 87%, about 88%, about 89%, about 90%, about 91%, about 92%, about 93%, about 94%, about 95%, about 96%, about 97%, about 98%, about 99%, or more sequence identity to SEQ ID NO: 157. In some embodiments, the present invention provides a recombinant polynucleotide sequence having at least 85%, 86%, 87%, 88%, 89%, 90%, 91%, 92%, 93%, 94%, 95%, 96%, 97%, 98%, 99%, or more sequence identity to SEQ ID NO: 157. In some embodiments, the polynucleotide encodes a recombinant alpha galactosidase A, wherein said recombinant alpha galactosidase A comprises a polypeptide sequence having at least 85%, 86%, 87%, 88%, 89%, 90%, 91%, 92%, 93%, 94%, 95%, 96%, 97%, 98%, 99%, or more sequence identity to SEQ ID NO: 158, or a functional fragment thereof, and wherein said recombinant alpha galactosidase A comprises at least one substitution or substitution set at one or more positions selected from 24/202, 39/47, 39/47/217, 39/151, 39/282/337/398, 39/337/343/398, 39/393/398, 47/130, 47/151, 47/343/345/393, 48, 48/68, 48/68/217/333/391/393, 48/68/333, 48/217, 48/333, 48/345/393, 48/393, 59/143, 68, 68/345, 130, 130/158, 130/158/393, 130/345/393, 143/271, 143/333, 143/387, 151, 151/158/217/343/345/393, 151/206/282/337/343/345/398, 151/282/393, 151/345/393/398, 151/393, 158, 158/393, 202, 206, 206/217, 217, 217/333, 217/337/345/398, 271, 282/393, 333, 333/345, 337/343/345/398, 343, 343/345/393/398, 393, and 393/398, wherein the amino acid positions of said polypeptide sequence are numbered with reference to SEQ ID NO: 158. In some embodiments, the recombinant alpha galactosidase A comprises a polypeptide sequence having at least 85%, 86%, 87%, 88%, 89%, 90%, 91%, 92%, 93%, 94%, 95%, 96%, 97%, 98%, 99%, or more sequence identity to SEQ ID NO: 158, or a functional fragment thereof, and wherein said recombinant alpha galactosidase A comprises at least one substitution or substitution set at one or more positions selected from 24S/202N, 39V/47D, 39V/47V/217K, 39V/151L, 39V/282N/337R/398A, 39V/337R/343G/398A, 39V/393V/398A, 47V/130E, 47V/151L, 47V/343D/345Q/393V, 48D, 48D/68E, 48D/68E/217K/333F/391A/393V, 48D/68E/333F, 48D/217K, 48D/333F, 48D/333G, 48D/345Q/393V, 48D/393V, 59A/143S, 68E, 68E/345Q, 130E, 130E/158R, 130E/158R/393V, 130E/345Q/393V, 143S/271N, 143S/333N, 143S/387N, 151L, 151L/158R/217K/343G/345Q/393V, 151L/206S/282N/337R/343D/345Q/398A, 151L/282N/393V, 151L/345Q/393V/398A, 151L/393V, 158R, 158R/393V, 202N, 206S, 206S/217K, 217K, 217K/333F, 217K/333G, 217K/337R/345Q/398A, 271N, 282N/393V, 333F/345Q, 333G, 333N, 337R/343G/345Q/398A, 343D, 343D/345Q/393V/398A, 393V, and 393V/398A, wherein the amino acid positions of said polypeptide sequence are numbered with reference to SEQ ID NO: 158. In some embodiments, the recombinant alpha galactosidase A comprises a polypeptide sequence having at least 85%, 86%, 87%, 88%, 89%, 90%, 91%, 92%, 93%, 94%, 95%, 96%, 97%, 98%, 99%, or more sequence identity to SEQ ID NO: 8, or a functional fragment thereof, and wherein said recombinant alpha galactosidase A comprises at least one substitution or substitution set at one or more positions selected from D24S/D202N, E39V/T47D, E39V/T47V/R217K, E39V/D151L, E39V/D282N/P337R/L398A, E39V/P337R/K343G/L398A, E39V/S393V/L398A, T47V/D130E, T47V/D151L, T47V/K343D/V345Q/5393V, E48D, E48D/Q68E, E48D/Q68E/R217K/5333F/Q391A/5393V, E48D/Q68E/S333F, E48D/R217K, E48D/S333F, E48D/S333G, E48D/V345Q/5393V, E48D/S393V, C59A/C143S, Q68E, Q68E/V345Q, D130E, D130E/L158R, D130E/L158R/5393V, D130E/V345Q/5393V, C143S/A271N, C143S/5333N, C143S/E387N, D151L, D151L/L158R/R217K/K343G/V345Q/5393V, D151L/A206S/D282N/P337R/K343D/V345Q/L398A, D151L/D282N/5393V, D151L/V345Q/5393V/L398A, D151L/5393V, L158R, L158R/5393V, D202N, A206S, A206S/R217K, R217K, R217K/5333F, R217K/5333G, R217K/P337R/V345Q/L398A, A271N, D282N/S393V, 5333F/V345Q, S333G, S333N, P337R/K343G/V345Q/L398A, K343D, K343D/V345Q/5393V/L398A, S393V, and S393V/L398A, wherein the amino acid positions of said polypeptide sequence are numbered with reference to SEQ ID NO: 158.

[0139] In some embodiments, the present invention provides a recombinant polynucleotide sequence having at least about 85%, about 86%, about 87%, about 88%, about 89%, about 90%, about 91%, about 92%, about 93%, about 94%, about 95%, about 96%, about 97%, about 98%, about 99%, or more sequence identity to SEQ ID NO: 371. In some embodiments, the present invention provides a recombinant polynucleotide sequence having at least 85%, 86%, 87%, 88%, 89%, 90%, 91%, 92%, 93%, 94%, 95%, 96%, 97%, 98%, 99%, or more sequence identity to SEQ ID NO: 371. In some embodiments, the polynucleotide encodes a recombinant alpha galactosidase A, wherein said recombinant alpha galactosidase A comprises a polypeptide sequence having at least 85%, 86%, 87%, 88%, 89%, 90%, 91%, 92%, 93%, 94%, 95%, 96%, 97%, 98%, 99%, or more sequence identity to SEQ ID NO: 372, or a functional fragment thereof, and wherein said recombinant alpha galactosidase A comprises at least one substitution or substitution set at one or more positions selected from 10, 10/39/44/322, 10/39/92/206/217/271, 10/39/92/247, 10/39/92/247/271/316, 10/44, 10/44/47/92/247, 10/44/47/261/302/322/368, 10/44/92/316/322, 10/44/261/302/316, 10/44/302/337/368, 10/47/217/247/316/392, 10/47/217/322, 10/47/271, 10/92, 10/92/206/217/247, 10/92/206/247/316/322/392, 10/92/206/247/322/368, 10/92/217/261/302/337, 10/206/217/271, 10/206/247, 10/206/261/271/316, 10/261, 10/271/302, 10/302, 10/302/316, 10/302/322/337, 10/316/322, 10/337/392, 10/368, 39/44/92/162/247/302/316/322, 39/44/92/217/322, 39/44/92/247/271/302, 39/47/92/247/302/316/322, 39/47/217/247/368, 39/47/247, 39/92/247/302/316/337/368, 39/92/316/322, 39/247/271, 39/247/271/316, 39/322, 44/47/92/206/217/316/322, 44/47/92/247/261/271/316/337/368, 44/47/206/217/247/271/322, 44/47/247/322/368, 44/47/302/316/322, 44/92/206/247/368, 44/206/337, 44/247/261/302/316, 44/247/261/302/316/322, 47/92/247/271, 47/217/302, 47/247, 47/247/271, 89/217/247/261/302/316, 92/217/271, 92/247, 92/247/271/322, 92/247/302/322/337, 92/271/337, 92/302, 92/316, 206/217/271/392, 217/247/316/322/337/368, 247, 247/271, 247/302, 271, 271/302/322, 271/316/322, 302/322/368, and 368, wherein the amino acid positions of said polypeptide sequence are numbered with reference to SEQ ID NO: 372. In some embodiments, the recombinant alpha galactosidase A comprises a polypeptide sequence having at least 85%, 86%, 87%, 88%, 89%, 90%, 91%, 92%, 93%, 94%, 95%, 96%, 97%, 98%, 99%, or more sequence identity to SEQ ID NO: 372, or a functional fragment thereof, and wherein said recombinant alpha galactosidase A comprises at least one substitution or substitution set at one or more positions selected from 10P, 10P/39E/44R/322I, 10P/39E/92H/206A/217R/271A, 10P/39E/92H/247D, 10P/39E/92H/247D/271A/316D, 10P/44R, 10P/44R/47T/92H/247D, 10P/44R/47T/261G/302K/322I/368A, 10P/44R/92H/316D/322I, 10P/44R/261G/302K/316D, 10P/44R/302K/337P/368A, 10P/47T/217R/247D/316D/392T, 10P/47T/217R/322I, 10P/47T/271A, 10P/92H, 10P/92H/206A/217R/247D, 10P/92H/206A/247D/316D/322I/392T, 10P/92H/206A/247D/322I/368A, 10P/92H/217R/261G/302K/337P, 10P/206A/217R/271A, 10P/206A/247D, 10P/206A/261G/271A/316D, 10P/261G, 10P/271A/302K, 10P/302K, 10P/302K/316D, 10P/302K/322I/337P, 10P/316D/322I, 10P/337P/392T, 10P/368A, 39E/44R/92H/162M/247D/302K/316D/322I, 39E/44R/92H/217R/322I, 39E/44R/92H/247D/271A/302K, 39E/47T/92H/247D/302K/316D/322I, 39E/47T/217R/247D/368A, 39E/47T/247D, 39E/92H/247D/302K/316D/337P/368A, 39E/92H/316D/322I, 39E/247D/271A, 39E/247D/271A/316D, 39E/322I, 44R/47T/92H/206A/217R/316D/322I, 44R/47T/92H/247D/261G/271A/316D/337P/368A, 44R/47T/206A/217R/247D/271A/322I, 44R/47T/247D/322I/368A, 44R/47T/302K/316D/322I, 44R/92H/206A/247D/368A, 44R/206A/337P, 44R/247D/261G/302K/316D, 44R/247D/261G/302K/316D/322I, 47T/92H/247D/271A, 47T/217R/302K, 47T/247D, 47T/247D/271A, 89I/217R/247D/261G/302K/316D, 92H/217R/271A, 92H/247D, 92H/247D/271A/322I, 92H/247D/302K/322I/337P, 92H/271A/337P, 92H/302K, 92H/316D, 206A/217R/271A/392T, 217R/247D/316D/322I/337P/368A, 247D, 247D/271A, 247D/302K, 271A, 271A/302K/322I, 271A/316D/322I, 302K/322I/368A, and 368A, wherein the amino acid positions of said polypeptide sequence are numbered with reference to SEQ ID NO: 372. In some embodiments, the recombinant alpha galactosidase A comprises a polypeptide sequence having at least 85%, 86%, 87%, 88%, 89%, 90%, 91%, 92%, 93%, 94%, 95%, 96%, 97%, 98%, 99%, or more sequence identity to SEQ ID NO: 372, or a functional fragment thereof, and wherein said recombinant alpha galactosidase A comprises at least one substitution or substitution set at one or more positions selected from T10P, T10P/M39E/L44R/M322I, T10P/M39E/Y92H/K206A/F217R/H271A, T10P/M39E/Y92H/N247D, T10P/M39E/Y92H/N247D/H271A/L316D, T10P/L44R, T10P/L44R/S47T/Y92H/N247D, T10P/L44R/S47T/A261G/Q302K/M322I/W368A, T10P/L44R/Y92H/L316D/M322I, T10P/L44R/A261G/Q302K/L316D, T10P/L44R/Q302K/A337P/W368A, T10P/S47T/F217R/N247D/L316D/M392T, T10P/S47T/F217R/M322I, T10P/S47T/H271A, T10P/Y92H, T10P/Y92H/K206A/F217R/N247D, T10P/Y92H/K206A/N247D/L316D/M322I/M392T, T10P/Y92H/K206A/N247D/M322I/W368A, T10P/Y92H/F217R/A261G/Q302K/A337P, T10P/K206A/F217R/H271A, T10P/K206A/N247D, T10P/K206A/A261G/H271A/L316D, T10P/A261G, T10P/H271A/Q302K, T10P/Q302K, T10P/Q302K/L316D, T10P/Q302K/M322I/A337P, T10P/L316D/M322I, T10P/A337P/M392T, T10P/W368A, M39E/L44R/Y92H/R162M/N247D/Q302K/L316D/M322I, M39E/L44R/Y92H/F217R/M322I, M39E/L44R/Y92H/N247D/H271A/Q302K, M39E/S47T/Y92H/N247D/Q302K/L316D/M322I, M39E/S47T/F217R/N247D/W368A, M39E/S47T/N247D, M39E/Y92H/N247D/Q302K/L316D/A337P/W368A, M39E/Y92H/L316D/M322I, M39E/N247D/H271A, M39E/N247D/H271A/L316D, M39E/M322I, L44R/S47T/Y92H/K206A/F217R/L316D/M322I, L44R/S47T/Y92H/N247D/A261G/H271A/L316D/A337P/W368A, L44R/S47T/K206A/F217R/N247D/H271A/M322I, L44R/S47T/N247D/M322I/W368A, L44R/S47T/Q302K/L316D/M322I, L44R/Y92H/K206A/N247D/W368A, L44R/K206A/A337P, L44R/N247D/A261G/Q302K/L316D, L44R/N247D/A261G/Q302K/L316D/M322I, S47T/Y92H/N247D/H271A, S47T/F217R/Q302K, S47T/N247D, S47T/N247D/H271A, L89I/F217R/N247D/A261G/Q302K/L316D, Y92H/F217R/H271A, Y92H/N247D, Y92H/N247D/H271A/M322I, Y92H/N247D/Q302K/M322I/A337P, Y92H/H271A/A337P, Y92H/Q302K, Y92H/L316D, K206A/F217R/H271A/M392T, F217R/N247D/L316D/M322I/A337P/W368A, N247D, N247D/H271A, N247D/Q302K, H271A, H271A/Q302K/M322I, H271A/L316D/M322I, Q302K/M322I/W368A, and W368A, wherein the amino acid positions of said polypeptide sequence are numbered with reference to SEQ ID NO: 372.

[0140] In some embodiments, the present invention provides a recombinant polynucleotide sequence having at least about 85%, about 86%, about 87%, about 88%, about 89%, about 90%, about 91%, about 92%, about 93%, about 94%, about 95%, about 96%, about 97%, about 98%, about 99%, or more sequence identity to SEQ ID NO: 373. In some embodiments, the present invention provides a recombinant polynucleotide sequence having at least 85%, 86%, 87%, 88%, 89%, 90%, 91%, 92%, 93%, 94%, 95%, 96%, 97%, 98%, 99%, or more sequence identity to SEQ ID NO: 373. In some embodiments, the polynucleotide encodes a recombinant alpha galactosidase A, wherein said recombinant alpha galactosidase A comprises a polypeptide sequence having at least 85%, 86%, 87%, 88%, 89%, 90%, 91%, 92%, 93%, 94%, 95%, 96%, 97%, 98%, 99%, or more sequence identity to SEQ ID NO: 374, or a functional fragment thereof, and wherein said recombinant alpha galactosidase A comprises at least one substitution or substitution set at one or more positions selected from 10/36/92/166/247/261/316/392, 10/39, 10/39/44/47/92/206/217, 10/39/44/47/316, 10/39/44/47/337, 10/39/44/92/166/261/316/322, 10/39/44/92/166/302/322, 10/39/44/92/166/392, 10/39/44/92/217/302/322, 10/39/44/92/302/322, 10/39/44/166/261/271/316/322, 10/39/44/392, 10/39/47/92/337, 10/39/92/131/166/271/316/322, 10/39/92/166/217/247/271, 10/39/92/217/316, 10/44/47/166/261/271, 10/44/47/166/271/322/368, 10/44/47/217/271/316/322, 10/44/92, 10/44/92/217/247/271/302/316/392, 10/44/166/302, 10/44/206/316/322, 10/47/92/166/271/316/337, 10/47/92/271/302, 10/47/92/316/322/392, 10/47/166/271, 10/47/166/316, 10/92/166, 10/92/166/217/247/261/271, 10/92/166/261/271/392, 10/92/166/261/316/322/337, 10/92/166/337/368, 10/92/302/337, 10/92/316/322, 10/206, 10/206/247/261, 10/217/322, 10/261, 10/261/337/392, 10/316/392, 10/368, 39/44/47/92/166/206/392, 39/44/47/92/206/247/261, 39/44/47/92/206/392, 39/44/47/206/337/368/392, 39/44/92/166/247/261/302/337, 39/44/166/271, 39/44/166/271/337/368/392, 39/47/92/316/322, 39/47/92/392, 39/47/166/217/261/392, 39/47/217/247/368, 39/47/247, 39/92/166/217/392, 39/92/261/302, 39/166/217/261/316/368, 39/322, 39/392, 44/47, 44/47/92/217/271, 44/47/92/217/316/322/392, 44/47/92/392, 44/47/166, 44/47/166/271, 44/47/247/271/392, 44/316/322/392, 44/337, 47/166/206/217/247/337, 47/166/217/271/337, 47/206, 47/217/247/261, 47/271, 52/217/302/316, 92/166/206/271/316, 92/166/217/261/271/392, 92/166/217/316/337/392, 92/166/247, 92/166/316, 92/206/322, 92/217, 92/217/271/337, 92/261/271, 92/271, 166/217/316/322/337, 166/247/271/316, 166/316/322/337, 206/217, 217/392, 247/316, 316/322/368, and 316/337/392, wherein the amino acid positions of said polypeptide sequence are numbered with reference to SEQ ID NO: 374. In some embodiments, the recombinant alpha galactosidase A comprises a polypeptide sequence having at least 85%, 86%, 87%, 88%, 89%, 90%, 91%, 92%, 93%, 94%, 95%, 96%, 97%, 98%, 99%, or more sequence identity to SEQ ID NO: 374, or a functional fragment thereof, and wherein said recombinant alpha galactosidase A comprises at least one substitution or substitution set at one or more positions selected from 10T/36M/92Y/166S/247N/261A/316L/392M, 10T/39M, 10T/39M/44L/47S/92Y/206K/217F, 10T/39M/44L/47S/316L, 10T/39M/44L/47S/337A, 10T/39M/44L/92Y/166S/261A/316L/322M, 10T/39M/44L/92Y/166S/302Q/322M, 10T/39M/44L/92Y/166S/392M, 10T/39M/44L/92Y/217F/302Q/322M, 10T/39M/44L/92Y/302Q/322M, 10T/39M/44L/166S/261A/271H/316L/322M, 10T/39M/44L/392M, 10T/39M/47S/92Y/337A, 10T/39M/92Y/131G/166S/271H/316L/322M, 10T/39M/92Y/166S/217F/247N/271H, 10T/39M/92Y/217F/316L, 10T/44L/47S/166S/261A/271H, 10T/44L/47S/166S/271H/322M/368W, 10T/44L/47S/217F/271H/316L/322M, 10T/44L/92Y, 10T/44L/92Y/217F/247N/271H/302Q/316L/392M, 10T/44L/166S/302Q, 10T/44L/206K/316L/322M, 10T/47S/92 Y/166S/271H/316L/337A, 10T/47S/92Y/271H/302Q, 10T/47S/92Y/316L/322M/392M, 10T/47S/166S/271H, 10T/47S/166S/316L, 10T/92Y/166S, 10T/92Y/166S/217F/247N/261A/271H, 10T/92Y/166S/261A/271H/392M, 10T/92Y/166S/261A/316L/322M/337A, 10T/92Y/166S/337A/368W, 10T/92Y/302Q/337A, 10T/92Y/316L/322M, 10T/206K, 10T/206K/247N/261A, 10T/217F/322M, 10T/261A, 10T/261A/337A/392M, 10T/316L/392M, 10T/368W, 39M/44L/47S/92 Y/166S/206K/392M, 39M/44L/47S/92Y/206K/247N/261A, 39M/44L/47S/92Y/206K/392M, 39M/44L/47S/206K/337A/368W/392M, 39M/44L/92Y/166S/247N/261A/302Q/337A, 39M/44L/166S/271H, 39M/44L/166S/271H/337A/368W/392M, 39M/47S/92Y/316L/322M, 39M/47S/92Y/392M, 39M/47S/166S/217F/261A/392M, 39M/47S/217F/247N/368W, 39M/47S/247N, 39M/92Y/166S/217F/392M, 39M/92Y/261A/302Q, 39M/166S/217F/261A/316L/368W, 39M/322M, 39M/392M, 44L/47S, 44L/47S/92Y/217F/271H, 44L/47S/92 Y/217F/316L/322M/392M, 44L/47S/92Y/392M, 44L/47S/166S, 44L/47S/166S/271H, 44L/47S/247N/271H/392M, 44L/316L/322M/392M, 44L/337A, 47S/166S/206K/217F/247N/337A, 47S/166S/217F/271H/337A, 47S/206K, 47S/217F/247N/261A, 47S/271H, 52N/217F/302Q/316L, 92Y/166S/206K/271H/316L, 92Y/166S/217F/261A/271H/392M, 92Y/166S/217F/316L/337A/392M, 92Y/166S/247N, 92Y/166S/316L, 92Y/206K/322M, 92Y/217F, 92Y/217F/271H/337A, 92Y/261A/271H, 92Y/271H, 166S/217F/316L/322M/337A, 166S/247N/271H/316L, 166S/316L/322M/337A, 206K/217F, 217F/392M, 247N/316L, 316L/322M/368W, and 316L/337A/392M, wherein the amino acid positions of said polypeptide sequence are numbered with reference to SEQ ID NO: 374. In some embodiments, the recombinant alpha galactosidase A comprises a polypeptide sequence having at least 85%, 86%, 87%, 88%, 89%, 90%, 91%, 92%, 93%, 94%, 95%, 96%, 97%, 98%, 99%, or more sequence identity to SEQ ID NO: 374, or a functional fragment thereof, and wherein said recombinant alpha galactosidase A comprises at least one substitution or substitution set at one or more positions selected from P10T/K36M/H92Y/P166S/D247N/G261A/D316L/T392M, P10T/E39M, P10T/E39M/R44L/T47S/H92Y/A206K/R217F, P10T/E39M/R44L/T47S/D316L, P10T/E39M/R44L/T47S/P337A, P10T/E39M/R44L/H92Y/P166S/G261A/D316L/I322M, P10T/E39M/R44L/H92Y/P166S/K302Q/I322M, P10T/E39M/R44L/H92Y/P166S/T392M, P10T/E39M/R44L/H92Y/R217F/K302Q/I322M, P10T/E39M/R44L/H92Y/K302Q/I322M, P10T/E39M/R44L/P166S/G261A/A271H/D316L/I322M, P10T/E39M/R44L/T392M, P10T/E39M/T47S/H92Y/P337A, P10T/E39M/H92Y/W131G/P166S/A271H/D316L/I322M, P10T/E39M/H92Y/P166S/R217F/D247N/A271H, P10T/E39M/H92Y/R217F/D316L, P10T/R44L/T47S/P166S/G261A/A271H, P10T/R44L/T47S/P166S/A271H/I322M/A368W, P10T/R44L/T47S/R217F/A271H/D316L/I322M, P10T/R44L/H92Y, P10T/R44L/H92Y/R217F/D247N/A271H/K302Q/D316L/T392M, P10T/R44L/P166S/K302Q, P10T/R44L/A206K/D316L/I322M, P10T/T47S/H92Y/P166S/A271H/D316L/P337A, P10T/T47S/H92Y/A271H/K302Q, P10T/T47S/H92Y/D316L/I322M/T392M, P10T/T47S/P166S/A271H, P10T/T47S/P166S/D316L, P10T/H92Y/P166S, P10T/H92Y/P166S/R217F/D247N/G261A/A271H, P10T/H92Y/P166S/G261A/A271H/T392M, P10T/H92Y/P166S/G261A/D316L/I322M/P337A, P10T/H92Y/P166S/P337A/A368W, P10T/H92Y/K302Q/P337A, P10T/H92Y/D316L/I322M, P10T/A206K, P10T/A206K/D247N/G261A, P10T/R217F/I322M, P10T/G261A, P10T/G261A/P337A/T392M, P10T/D316L/T392M, P10T/A368W, E39M/R44L/T47S/H92Y/P166S/A206K/T392M, E39M/R44L/T47S/H92Y/A206K/D247N/G261A, E39M/R44L/T47S/H92Y/A206K/T392M, E39M/R44L/T47S/A206K/P337A/A368W/T392M, E39M/R44L/H92Y/P166S/D247N/G261A/K302Q/P337A, E39M/R44L/P166S/A271H, E39M/R44L/P166S/A271H/P337A/A368W/T392M, E39M/T47S/H92Y/D316L/I322M, E39M/T47S/H92Y/T392M, E39M/T47S/P166S/R217F/G261A/T392M, E39M/T47S/R217F/D247N/A368W, E39M/T47S/D247N, E39M/H92Y/P166S/R217F/T392M, E39M/H92Y/G261A/K302Q, E39M/P166S/R217F/G261A/D316L/A368W, E39M/I322M, E39M/T392M, R44L/T47S, R44L/T47S/H92Y/R217F/A271H, R44L/T47S/H92Y/R217F/D316L/I322M/T392M, R44L/T47S/H92Y/T392M, R44L/T47S/P166S, R44L/T47S/P166S/A271H, R44L/T47S/D247N/A271H/T392M, R44L/D316L/I322M/T392M, R44L/P337A, T47S/P166S/A206K/R217F/D247N/P337A, T47 S/P166S/R217F/A271H/P337A, T47S/A206K, T47 S/R217F/D247N/G261A, T47S/A271H, D52N/R217F/K302Q/D316L, H92Y/P166S/A206K/A271H/D316L, H92Y/P166S/R217F/G261A/A271H/T392M, H92Y/P166S/R217F/D316L/P337A/T392M, H92Y/P166S/D247N, H92Y/P166S/D316L, H92Y/A206K/I322M, H92Y/R217F, H92Y/R217F/A271H/P337A, H92Y/G261A/A271H, H92Y/A271H, P166S/R217F/D316L/I322M/P337A, P166S/D247N/A271H/D316L, P166S/D316L/I322M/P337A, A206K/R217F, R217F/T392M, D247N/D316L, D316L/I322M/A368W, and D316L/P337A/T392M, wherein the amino acid positions of said polypeptide sequence are numbered with reference to SEQ ID NO: 374.

[0141] In some embodiments, the polynucleotide encodes a recombinant alpha galactosidase A comprising a polypeptide sequence having at least 85%, 86%, 87%, 88%, 89%, 90%, 91%, 92%, 93%, 94%, 95%, 96%, 97%, 98%, 99%, or more sequence identity to SEQ ID NO: 704, or a functional fragment thereof, and wherein said recombinant alpha galactosidase A comprises at least one substitution or substitution set at one or more positions selected from 2, 4, 5, 24/59, 24/143/144, 24/143/202/333, 24/143/202/352/390/391, 24/143/333/352/387/390/391, 24/143/390/391, 24/202, 24/202/271, 24/202/333/352, 24/271/352, 24/352/387/390/391, 24/387/391, 31, 40, 59, 59/143, 59/143/202, 59/143/202/271/333, 59/143/271, 59/143/333, 59/202, 59/202/333, 59/271/387/390, 73, 76, 80, 83, 84, 91/215/361, 122, 123, 143, 143/202, 143/271, 143/271/352/390, 143/333, 143/333/387/390, 143/387/391, 147, 155, 164, 165, 179, 186, 202, 202/333, 210, 215/218, 218, 218/361, 218/361/398, 218/398, 246, 254/398, 271, 271/333, 271/333/390/391, 271/333/391, 271/352/391, 273, 275, 277, 278, 280, 281, 283, 284, 287, 300, 303, 304, 325, 331, 332, 333/352, 333/390/391, 333/391, 334, 335, 336, 338, 339, 340, 341, 343, 359, 360, 361, 362, 367, 369, 371, 373, 375, 377, 382, 382/398, 385, 387/391, 390, and 398, wherein the amino acid positions of said polypeptide sequence are numbered with reference to SEQ ID NO: 704. In some embodiments, the recombinant alpha galactosidase A comprises a polypeptide sequence having at least 85%, 86%, 87%, 88%, 89%, 90%, 91%, 92%, 93%, 94%, 95%, 96%, 97%, 98%, 99%, or more sequence identity to SEQ ID NO: 704, or a functional fragment thereof, and wherein said recombinant alpha galactosidase A comprises at least one substitution or substitution set at one or more positions selected from 2S, 4L, 5M, 5V, 24S/59A, 24S/143S/144N, 24S/143S/202N/333N, 24S/143S/202N/352N/390N/391N, 24S/143S/333N/352N/387N/390T/391N, 24S/143S/390T/391N, 24S/202N, 24S/202N/271N, 24S/202N/333N/352N, 24S/271N/352N, 24S/352N/387N/390N/391N, 24S/387N/391N, 31F, 31H, 31L, 31T, 31W, 40Q, 59A, 59A/143S, 59A/143S/271N, 59A/202N, 59T, 59T/143S/202N, 59T/143S/333N, 59T/202N/333N, 59V/143S/202N/271N/333N, 59V/271N/387N/390T, 73A, 76A, 76F, 76M, 76S, 80T, 83R, 83S, 84G, 84K, 84R, 91S/215S/361T, 122E, 122N, 122S, 123Q, 123R, 123S, 123T, 143S, 143S/202N, 143S/271N, 143S/271N/352N/390N, 143S/333N, 143S/333N/387N/390T, 143S/387N/391N, 147L, 147S, 155A, 155D, 155F, 155L, 155R, 155T, 164E, 1651, 179H, 179L, 179R, 179W, 186E, 186F, 186M, 186P, 186R, 186S, 186Y, 202N, 202N/333N, 2101, 215S/218Y, 218Y, 218Y/361T, 218Y/361T/398F, 218Y/398F, 246Y, 254T/398F, 271N, 271N/333N, 271N/333N/390N/391N, 271N/333N/391N, 271N/352N/391N, 273L, 275A, 275G, 277Q, 277V, 278N, 278R, 278S, 280G, 2811, 281M, 283L, 283P, 283T, 283V, 284A, 284E, 284G, 284L, 284M, 284R, 284S, 287R, 300F, 303A, 303C, 303W, 304T, 304V, 304W, 325A, 331M, 332G, 332H, 333N/352N, 333N/390N/391N, 333N/390S/391N, 333N/391N, 334C, 334V, 335A, 335L, 336F, 336G, 336S, 336T, 338L, 339G, 339N, 339Q, 339V, 340H, 340I, 340K, 340M, 340P, 340W, 341F, 341M, 343L, 343R, 343S, 343W, 359F, 359L, 359R, 360H, 360V, 361T, 361V, 362H, 367A, 367D, 367L, 367M, 369D, 371G, 373L, 373S, 375L, 375Q, 377Q, 382I, 382I/398F, 385R, 387N/391N, 390S, and 398F, wherein the amino acid positions of said polypeptide sequence are numbered with reference to SEQ ID NO: 704. In some embodiments, the recombinant alpha galactosidase A comprises a polypeptide sequence having at least 85%, 86%, 87%, 88%, 89%, 90%, 91%, 92%, 93%, 94%, 95%, 96%, 97%, 98%, 99%, or more sequence identity to SEQ ID NO: 704, or a functional fragment thereof, and wherein said recombinant alpha galactosidase A comprises at least one substitution or substitution set at one or more positions selected from D2S, G4L, LSM, LSV, D24S/C59A, D24S/C143S/D144N, D24S/C143S/D202N/G333N, D24S/C143S/D202N/F352N/M390N/Q391N, D24S/C143S/G333N/F352N/E387N/M390T/Q391N, D24S/C143S/M390T/Q391N, D24S/D202N, D24S/D202N/A271N, D24S/D202N/G333N/F352N, D24S/A271N/F352N, D24S/F352N/E387N/M390N/Q391N, D24S/E387N/Q391N, S31F, S31H, S31L, S31T, S31W, E40Q, C59A, C59A/C143S, C59A/C143S/A271N, C59A/D202N, C59T, C59T/C143S/D202N, C59T/C143S/G333N, C59T/D202N/G333N, C59V/C143S/D202N/A271N/G333N, C59V/A271N/E387N/M390T, G73A, Q76A, Q76F, Q76M, Q76S, Q80T, P83R, P83S, H84G, H84K, H84R, N91S/T215S/R361T, D122E, D122N, D122S, I123Q, I123R, I123S, I123T, C143S, C143S/D202N, C143S/A271N, C143S/A271N/F352N/M390N, C143S/G333N, C143S/G333N/E387N/M390T, C143S/E387N/Q391N, E147L, E147S, H155A, H155D, H155F, H155L, H155R, H155T, G164E, R1651, P179H, P179L, P179R, P179W, T186E, T186F, T186M, T186P, T186R, T186S, T186Y, D202N, D202N/G333N, S210I, T215S/N218Y, N218Y, N218Y/R361T, N218Y/R361T/L398F, N218Y/L398F, W246Y, A254T/L398F, A271N, A271N/G333N, A271N/G333N/M390N/Q391N, A271N/G333N/Q391N, A271N/F352N/Q391N, S273L, Q275A, Q275G, K277Q, K277V, A278N, A278R, A278S, L280G, Q281I, Q281M, K283L, K283P, K283T, K283V, D284A, D284E, D284G, D284L, D284M, D284R, D284S, A287R, L300F, G303A, G303C, G303W, D304T, D304V, D304W, R325A, P331M, R332G, R332H, G333N/F352N, G333N/M390N/Q391N, G333N/M390S/Q391N, G333N/Q391N, Y334C, Y334V, T335A, T335L, I336F, I336G, I336S, I336T, V338L, A339G, A339N, A339Q, A339V, S340H, S340I, S340K, S340M, S340P, S340W, L341F, L341M, K343L, K343R, K343S, K343W, V359F, V359L, V359R, K360H, K360V, R361T, R361V, K362H, E367A, E367D, E367L, E367M, T369D, R371G, R373L, R373S, H375L, H375Q, N377Q, V382I, V382I/L398F, Q385R, E387N/Q391N, M390S, and L398F, wherein the amino acid positions of said polypeptide sequence are numbered with reference to SEQ ID NO: 704.

[0142] In some embodiments, the polynucleotide encodes a recombinant alpha galactosidase A comprising a polypeptide sequence having at least 85%, 86%, 87%, 88%, 89%, 90%, 91%, 92%, 93%, 94%, 95%, 96%, 97%, 98%, 99%, or more sequence identity to SEQ ID NO: 374, or a functional fragment thereof, and wherein said recombinant alpha galactosidase A comprises at least one substitution or substitution set at one or more positions selected from 10, 39, 44, 47, 92, 166, 206, 217, 247, 261, 271, 302, 316, 322, 337, 368, and 392, wherein the amino acid positions of said polypeptide sequence are numbered with reference to SEQ ID NO: 374. In some embodiments, the recombinant alpha galactosidase A comprises a polypeptide sequence having at least 85%, 86%, 87%, 88%, 89%, 90%, 91%, 92%, 93%, 94%, 95%, 96%, 97%, 98%, 99%, or more sequence identity to SEQ ID NO: 374, or a functional fragment thereof, and wherein said recombinant alpha galactosidase A comprises at least one substitution or substitution set at one or more positions selected from 10A, 10C, 10D, 10E, 10F, 10G, 10H, 10I, 10K, 10L, 10M, 10N, 10Q, 10R, 10S, 10T, 10V, 10W, 10Y, 39A, 39C, 39D, 39F, 39G, 39H, 39I, 39K, 39L, 39M, 39N, 39P, 39Q, 39R, 39S, 39T, 39V, 39W, 39Y, 44A, 44C, 44D, 44E, 44F, 44G, 44H, 44I, 44K, 44L, 44N, 44P, 44Q, 44S, 44T, 44V, 44W, 44Y, 47A, 47C, 47D, 47E, 47F, 47G, 47H, 47I, 47K, 47L, 47M, 47N, 47P, 47Q, 47R, 47S, 47V, 47W, 47Y, 92A, 92C, 92D, 92E, 92F, 92G, 92I, 92K, 92L, 92M, 92N, 92P, 92Q, 92R, 92S, 92T, 92V, 92W, 92Y, 166A, 166C, 166D, 166E, 166F, 166G, 166H, 166I, 166K, 166L, 166M, 166N, 166Q, 166R, 166S, 166T, 166V, 166W, 166Y, 206C, 206D, 206E, 206F, 206G, 206H, 206I, 206K, 206L, 206M, 206N, 206P, 206Q, 206R, 206S, 206T, 206V, 206W, 206Y, 217A, 217C, 217D, 217E, 217F, 217G, 217H, 217I, 217K, 217L, 217M, 217N, 217P, 217Q, 217S, 217T, 217V, 217W, 217Y, 247A, 247C, 247E, 247F, 247G, 247H, 247I, 247K, 247L, 247M, 247N, 247P, 247Q, 247R, 247S, 247T, 247V, 247W, 247Y, 261A, 261C, 261D, 261E, 261F, 261H, 261I, 261K, 261L, 261M, 261N, 261P, 261Q, 261R, 261S, 261T, 261V, 261W, 261Y, 271C, 271D, 271E, 271F, 271G, 271H, 271I, 271K, 271L, 271M, 271N, 271P, 271Q, 271R, 271S, 271T, 271V, 271W, 271Y, 302A, 302C, 302D, 302E, 302F, 302G, 302H, 302I, 302L, 302M, 302N, 302P, 302Q, 302R, 302S, 302T, 302V, 302W, 302Y, 316A, 316C, 316E, 316F, 316G, 316H, 316I, 316K, 316L, 316M, 316N, 316P, 316Q, 316R, 316S, 316T, 316V, 316W, 316Y, 322A, 322C, 322D, 322E, 322F, 322G, 322H, 322K, 322L, 322M, 322N, 322P, 322Q, 322R, 322S, 322T, 322V, 322W, 322Y, 337A, 337C, 337D, 337E, 337F, 337G, 337H, 337I, 337K, 337L, 337M, 337N, 337Q, 337R, 337S, 337T, 337V, 337W, 337Y, 368C, 368D, 368E, 368F, 368G, 368H, 368I, 368K, 368L, 368M, 368N, 368P, 368Q, 368R, 368S, 368T, 368V, 368W, 368Y, 392A, 392C, 392D, 392E, 392F, 392G, 392H, 392I, 392K, 392L, 392M, 392N, 392P, 392Q, 392R, 392S, 392V, 392W, and 392Y, wherein the amino acid positions of said polypeptide sequence are numbered with reference to SEQ ID NO: 374. In some embodiments, the recombinant alpha galactosidase A comprises a polypeptide sequence having at least 85%, 86%, 87%, 88%, 89%, 90%, 91%, 92%, 93%, 94%, 95%, 96%, 97%, 98%, 99%, or more sequence identity to SEQ ID NO: 374, or a functional fragment thereof, and wherein said recombinant alpha galactosidase A comprises at least one substitution or substitution set at one or more positions selected from P10A, P10C, P10D, P10E, P10F, P10G, P10H, P10I, P10K, P10L, P10M, P10N, P10Q, P10R, P10S, P10T, P10V, P10W, P10Y, E39A, E39C, E39D, E39F, E39G, E39H, E391, E39K, E39L, E39M, E39N, E39P, E39Q, E39R, E39S, E39T, E39V, E39W, E39Y, R44A, R44C, R44D, R44E, R44F, R44G, R44H, R441, R44K, R44L, R44N, R44P, R44Q, R44S, R44T, R44V, R44W, R44Y, T47A, T47C, T47D, T47E, T47F, T47G, T47H, T471, T47K, T47L, T47M, T47N, T47P, T47Q, T47R, T47S, T47V, T47W, T47Y, H92A, H92C, H92D, H92E, H92F, H92G, H92I, H92K, H92L, H92M, H92N, H92P, H92Q, H92R, H92S, H92T, H92V, H92W, H92Y, P166A, P166C, P166D, P166E, P166F, P166G, P166H, P1661, P166K, P166L, P166M, P166N, P166Q, P166R, P166S, P166T, P166V, P166W, P166Y, A206C, A206D, A206E, A206F, A206G, A206H, A206I, A206K, A206L, A206M, A206N, A206P, A206Q, A206R, A206S, A206T, A206V, A206W, A206Y, R217A, R217C, R217D, R217E, R217F, R217G, R217H, R217I, R217K, R217L, R217M, R217N, R217P, R217Q, R217S, R217T, R217V, R217W, R217Y, D247A, D247C, D247E, D247F, D247G, D247H, D247I, D247K, D247L, D247M, D247N, D247P, D247Q, D247R, D247S, D247T, D247V, D247W, D247Y, G261A, G261C, G261D, G261E, G261F, G261H, G261I, G261K, G261L, G261M, G261N, G261P, G261Q, G261R, G261S, G261T, G261V, G261W, G261Y, A271C, A271D, A271E, A271F, A271G, A271H, A271I, A271K, A271L, A271M, A271N, A271P, A271Q, A271R, A271S, A271T, A271V, A271W, A271Y, K302A, K302C, K302D, K302E, K302F, K302G, K302H, K3021, K302L, K302M, K302N, K302P, K302Q, K302R, K302S, K302T, K302V, K302W, K302Y, D316A, D316C, D316E, D316F, D316G, D316H, D316I, D316K, D316L, D316M, D316N, D316P, D316Q, D316R, D316S, D316T, D316V, D316W, D316Y, I322A, I322C, I322D, 1322E, I322F, I322G, I322H, I322K, I322L, I322M, I322N, I322P, I322Q, I322R, I322S, I322T, I322V, I322W, I322Y, P337A, P337C, P337D, P337E, P337F, P337G, P337H, P337I, P337K, P337L, P337M, P337N, P337Q, P337R, P337S, P337T, P337V, P337W, P337Y, A368C, A368D, A368E, A368F, A368G, A368H, A368I, A368K, A368L, A368M, A368N, A368P, A368Q, A368R, A368S, A368T, A368V, A368W, A368Y, T392A, T392C, T392D, T392E, T392F, T392G, T392H, T392I, T392K, T392L, T392M, T392N, T392P, T392Q, T392R, T392S, T392V, T392W, and T392Y, wherein the amino acid positions of said polypeptide sequence are numbered with reference to SEQ ID NO: 374.

[0143] In some embodiments, the polynucleotide encodes a recombinant alpha galactosidase A comprising a polypeptide sequence having at least 85%, 86%, 87%, 88%, 89%, 90%, 91%, 92%, 93%, 94%, 95%, 96%, 97%, 98%, 99%, or more sequence identity to SEQ ID NO: 1022, or a functional fragment thereof, and wherein said recombinant alpha galactosidase A comprises at least one substitution or substitution set at one or more positions selected from 10, 10/392, 31, 31/39/44/166/302, 31/47, 31/283/284, 39, 39/44, 39/44/47, 39/44/47/261/283/284, 39/44/283, 39/44/339, 39/47/261, 39/92, 39/206, 39/284, 44, 44/284/302, 84, 84/92, 84/284/302/392, 84/316, 84/368/392, 92, 92/206/217, 92/206/275, 92/206/284, 92/206/302/368, 92/271, 92/271/277, 92/275/284, 92/283, 92/283/392, 92/284, 92/302, 92/316, 92/368, 155, 155/217, 155/368, 166, 166/283/284, 166/302, 206, 206/217, 206/334, 261, 261/283, 271, 271/368, 275, 283, 283/284, 283/392, 284, 302, 316, 334, 339, 368, 368/392, and 392, wherein the amino acid positions of said polypeptide sequence are numbered with reference to SEQ ID NO: 1022. In some embodiments, the recombinant alpha galactosidase A comprises a polypeptide sequence having at least 85%, 86%, 87%, 88%, 89%, 90%, 91%, 92%, 93%, 94%, 95%, 96%, 97%, 98%, 99%, or more sequence identity to SEQ ID NO: 1022, or a functional fragment thereof, and wherein said recombinant alpha galactosidase A comprises at least one substitution or substitution set at one or more positions selected from P10G, P10G/T392D, S31T, S31T/E39V/R44V/P166D/K302Y, S31T/T47R, S31T/K283L/D284A, E39L, E39L/H92V, E39L/A206E, E39L/D284S, E39V/R44V, E39V/R44V/T47R, E39V/R44V/T47R/G261S/K283L/D284A, E39V/R44V/K283T, E39V/R44V/A339N, E39V/T47R/G261S, R44V, R44V/D284E/K302Y, H84K, H84K/H92V, H84K/D284S/K302L/T392A, H84K/D316H, H84K/A368E/T392A, H92Q, H92T, H92T/A206E/R217N, H92T/A206E/K302T/A368E, H92T/A271K, H92T/A271K/K277R, H92T/K283P, H92T/K283V/T392W, H92T/D284M, H92T/K302L, H92T/A368E, H92V, H92V/A206E/D284S, H92V/A206Y/Q275A, H92V/Q275A/D284S, H92V/D284S, H92V/K302L, H92V/D316H, H155F, H155F/R2171, H155F/A368E, P166D, P166D/K283L/D284A, P166D/K302Y, A206E, A206E/R217N, A206I, A206Q, A206T/Y334C, A206Y, G261S, G261S/K283L, A271K, A271K/A368E, Q275A, K283L, K283P/T392W, K283T, K283T/D284E, D284E, D284M, D284S, K302L, K302Y, D316H, Y334C, A339N, A368E, A368E/T392W, T392A, T392D, and T392W, wherein the amino acid positions of said polypeptide sequence are numbered with reference to SEQ ID NO: 1022. In some embodiments, the recombinant alpha galactosidase A comprises a polypeptide sequence having at least 85%, 86%, 87%, 88%, 89%, 90%, 91%, 92%, 93%, 94%, 95%, 96%, 97%, 98%, 99%, or more sequence identity to SEQ ID NO: 1022, or a functional fragment thereof, and wherein said recombinant alpha galactosidase A comprises at least one substitution or substitution set at one or more positions selected from 10G, 10G/392D, 31T, 31T/39V/44V/166D/302Y, 31T/47R, 31T/283L/284A, 39L, 39L/92V, 39L/206E, 39L/284S, 39V/44V, 39V/44V/47R, 39V/44V/47R/261S/283L/284A, 39V/44V/283T, 39V/44V/339N, 39V/47R/261S, 44V, 44V/284E/302Y, 84K, 84K/92V, 84K/284S/302L/392A, 84K/316H, 84K/368E/392A, 92Q, 92T, 92T/206E/217N, 92T/206E/302T/368E, 92T/271K, 92T/271K/277R, 92T/283P, 92T/283V/392W, 92T/284M, 92T/302L, 92T/368E, 92V, 92V/206E/284S, 92V/206Y/275A, 92V/275A/284S, 92V/284S, 92V/302L, 92V/316H, 155F, 155F/2171, 155F/368E, 166D, 166D/283L/284A, 166D/302Y, 206E, 206E/217N, 2061, 206Q, 206T/334C, 206Y, 261S, 261S/283L, 271K, 271K/368E, 275A, 283L, 283P/392W, 283T, 283T/284E, 284E, 284M, 284S, 302L, 302Y, 316H, 334C, 339N, 368E, 368E/392W, 392A, 392D, and 392W, wherein the amino acid positions of said polypeptide sequence are numbered with reference to SEQ ID NO: 1022.

[0144] In some embodiments, as described above, the polynucleotide encodes an engineered polypeptide having GLA activity with the properties disclosed herein, wherein the polypeptide comprises an amino acid sequence having at least 80%, 81%, 82%, 83%, 84%, 85%, 86%, 87%, 88%, 89%, 90%, 91%, 92%, 93%, 94%, 95%, 96%, 97%, 98%, 99% or more identity to a reference sequence (e.g., SEQ ID NO: 2, 8, 58, 158, 372, 374, 704, and 1022), or the amino acid sequence of any variant as disclosed in any of the Tables herein, and one or more residue differences as compared to the reference polypeptide of SEQ ID NO: 8, or the amino acid sequence of any variant as disclosed in Table 2-1, 5-1, 6-1, 7-1, 8-1, 9-1, 11-1, 12-1, and/or 13-1 (for example 1, 2, 3, 4, 5, 6, 7, 8, 9, 10 or more amino acid residue positions). In some embodiments, the polynucleotide encodes an engineered polypeptide having GLA activity with the properties disclosed herein, wherein the polypeptide comprises an amino acid sequence having at least 80%, 81%, 82%, 83%, 84%, 85%, 86%, 87%, 88%, 89%, 90%, 91%, 92%, 93%, 94%, 95%, 96%, 97%, 98%, 99% or more sequence identity to reference sequence SEQ ID NO: 2, 8, 58, 158, 372, 374, 704, and/or 1022, and one or more residue differences as compared to SEQ ID NO: 2, 8, 58, 158, 372, 374, 704, and/or 1022, at residue positions selected from those provided in Table 2-1, 5-1, 6-1, 7-1, 8-1, 9-1, 11-1, 12-1, and/or 13-lwhen optimally aligned with the polypeptide of SEQ ID NO: 8, 58, 158, 372, 374, 704, and/or 1022.

[0145] In some embodiments, the polynucleotide encoding the engineered GLA polypeptides comprises the polynucleotide sequence of SEQ ID NO: 8, 58, 158, 372, 374, 704, and/or 1022. In some embodiments, the polynucleotides are capable of hybridizing under highly stringent conditions to a reference polynucleotide sequence. In some embodiments, the reference sequence is selected from SEQ ID NOS: 1, 7, 57, 157, 275, 371, 373, and/or 1019, or a complement thereof, or a polynucleotide sequence encoding any of the variant GLA polypeptides provided herein. In some embodiments, the polynucleotide capable of hybridizing under highly stringent conditions encodes a GLA polypeptide comprising an amino acid sequence that has one or more residue differences as compared to SEQ ID NO: 2, 8, 58, 158, 372, 374, 704, and/or 1022, at residue positions selected from any positions as set forth in Table 2-1, 5-1, 6-1, 7-1, 8-1, 9-1, 11-1, 12-1, and/or 13-1.

[0146] In some embodiments, an isolated polynucleotide encoding any of the engineered GLA polypeptides provided herein is manipulated in a variety of ways to provide for expression of the polypeptide. In some embodiments, the polynucleotides encoding the polypeptides are provided as expression vectors where one or more control sequences is present to regulate the expression of the polynucleotides and/or polypeptides. Manipulation of the isolated polynucleotide prior to its insertion into a vector may be desirable or necessary depending on the expression vector. The techniques for modifying polynucleotides and nucleic acid sequences utilizing recombinant DNA methods are well known in the art.

[0147] In some embodiments, the control sequences include among other sequences, promoters, Kozak sequence, leader sequences, polyadenylation sequences, propeptide sequences, signal peptide sequences, DNA based regulatory elements for gene therapy retention and transcription terminators. As known in the art, suitable promoters can be selected based on the host cells used. Exemplary promoters for filamentous fungal host cells, include promoters obtained from the genes for Aspergillus oryzae TAKA amylase, Rhizomucor miehei aspartic proteinase, Aspergillus niger neutral alpha-amylase, Aspergillus niger acid stable alpha-amylase, Aspergillus niger or Aspergillus awamori glucoamylase (glaA), Rhizomucor miehei lipase, Aspergillus oryzae alkaline protease, Aspergillus oryzae triose phosphate isomerase, Aspergillus nidulans acetamidase, and Fusarium oxysporum trypsin-like protease (See e.g., WO 96/00787), as well as the NA2-tpi promoter (a hybrid of the promoters from the genes for Aspergillus niger neutral alpha-amylase and Aspergillus oryzae triose phosphate isomerase), and mutant, truncated, and hybrid promoters thereof. Exemplary yeast cell promoters can be from the genes can be from the genes for Saccharomyces cerevisiae enolase (ENO-1), Saccharomyces cerevisiae galactokinase (GAL1), Saccharomyces cerevisiae alcohol dehydrogenase/glyceraldehyde-3-phosphate dehydrogenase (ADH2/GAP), and Saccharomyces cerevisiae 3-phosphoglycerate kinase. Other useful promoters for yeast host cells are known in the art (See e.g., Romanos et al., Yeast 8:423-488 [1992]). Exemplary promoters for use in mammalian cells include, but are not limited to those from cytomegalovirus (CMV), chicken β-actin promoter fused with the CMV enhancer, Simian vacuolating virus 40 (SV40), from Homo sapiens phosphoglycerate kinase, beta actin, elongation factor-la or glyceraldehyde-3-phosphate dehydrogenase, or from Gallus gallus β-actin.

[0148] In some embodiments, the control sequence is a suitable transcription terminator sequence, a sequence recognized by a host cell to terminate transcription. The terminator sequence is operably linked to the 3′ terminus of the nucleic acid sequence encoding the polypeptide. Any terminator which is functional in the host cell of choice finds use in the present invention. For example, exemplary transcription terminators for filamentous fungal host cells can be obtained from the genes for Aspergillus oryzae TAKA amylase, Aspergillus niger glucoamylase, Aspergillus nidulans anthranilate synthase, Aspergillus niger alpha-glucosidase, and Fusarium oxysporum trypsin-like protease. Exemplary terminators for yeast host cells can be obtained from the genes for Saccharomyces cerevisiae enolase, Saccharomyces cerevisiae cytochrome C (CYC1), and Saccharomyces cerevisiae glyceraldehyde-3-phosphate dehydrogenase. Other useful terminators for yeast host cells are known in the art (See e.g., Romanos et al., supra). Exemplary terminators for mammalian cells include, but are not limited to those from cytomegalovirus (CMV), Simian vacuolating virus 40 (SV40), from Homo sapiens growth hormone hGH, from bovine growth hormone BGFI, and from human or rabbit beta globulin.

[0149] In some embodiments, the control sequence is a suitable leader sequence, 5′-cap modification, 5′ UTR, etc. In some embodiments, these regulatory sequence elements mediate binding to molecules involved in mRNA trafficking and translation, inhibit 5′-exonucleolytic degradation and confer resistance to de-capping. The leader sequence is operably linked to the 5′ terminus of the nucleic acid sequence encoding the polypeptide. Any leader sequence that is functional in the host cell of choice may be used. Exemplary leaders for filamentous fungal host cells are obtained from the genes for Aspergillus oryzae TAKA amylase and Aspergillus nidulans triose phosphate isomerase. Suitable leaders for yeast host cells include, but are not limited to those obtained from the genes for Saccharomyces cerevisiae enolase (ENO-1), Saccharomyces cerevisiae 3-phosphoglycerate kinase, Saccharomyces cerevisiae alpha-factor, and Saccharomyces cerevisiae alcohol dehydrogenase/glyceraldehyde-3-phosphate dehydrogenase (ADH2/GAP). Suitable leaders for mammalian host cells include but are not limited to the 5″-UTR element present in orthopoxvirus mRNA.

[0150] In some embodiments, the control sequence comprises a 3′ untranslated nucleic acid region and polyadenylation tail nucleic acid sequence, sequences operably linked to the 3′ terminus of the protein coding nucleic acid sequence which mediate binding to proteins involved in mRNA trafficking and translation and mRNA half-life. Any polyadenylation sequence and 3′ UTR which is functional in the host cell of choice may be used in the present invention. Exemplary polyadenylation sequences for filamentous fungal host cells include, but are not limited to those from the genes for Aspergillus oryzae TAKA amylase, Aspergillus niger glucoamylase, Aspergillus nidulans anthranilate synthase, Fusarium oxysporum trypsin-like protease, and Aspergillus niger alpha-glucosidase. Useful polyadenylation sequences for yeast host cells are also known in the art (See e.g., Guo and Sherman, Mol. Cell. Biol., 15:5983-5990 [1995]). Useful polyadenylation and 3′ UTR sequences for mammalian host cells include, but are not limited to the 3′-UTRs of α- and β-globin mRNAs that harbor several sequence elements that increase the stability and translation of mRNA.

[0151] In some embodiments, the control sequence is a signal peptide coding region that codes for an amino acid sequence linked to the amino terminus of a polypeptide and directs the encoded polypeptide into the cell's secretory pathway. The 5′ end of the coding sequence of the nucleic acid sequence may inherently contain a signal peptide coding region naturally linked in translation reading frame with the segment of the coding region that encodes the secreted polypeptide. Alternatively, the 5′ end of the coding sequence may contain a signal peptide coding region that is foreign to the coding sequence. Any signal peptide coding region that directs the expressed polypeptide into the secretory pathway of a host cell of choice finds use for expression of the engineered GLA polypeptides provided herein. Effective signal peptide coding regions for filamentous fungal host cells include, but are not limited to the signal peptide coding regions obtained from the genes for Aspergillus oryzae TAKA amylase, Aspergillus niger neutral amylase, Aspergillus niger glucoamylase, Rhizomucor miehei aspartic proteinase, Humicola insolens cellulase, and Humicola lanuginosa lipase. Useful signal peptides for yeast host cells include, but are not limited to those from the genes for Saccharomyces cerevisiae alpha-factor and Saccharomyces cerevisiae invertase. Useful signal peptides for mammalian host cells include but are not limited to those from the genes for immunoglobulin gamma (IgG).

[0152] In some embodiments, the control sequence is a propeptide coding region that codes for an amino acid sequence positioned at the amino terminus of a polypeptide. The resultant polypeptide is referred to as a “proenzyme,” “propolypeptide,” or “zymogen,” in some cases). A propolypeptide can be converted to a mature active polypeptide by catalytic or autocatalytic cleavage of the propeptide from the propolypeptide.

[0153] In another aspect, the present invention also provides a recombinant expression vector comprising a polynucleotide encoding an engineered GLA polypeptide, and one or more expression regulating regions such as a promoter and a terminator, a replication origin, etc., depending on the type of hosts into which they are to be introduced. in some embodiments, the various nucleic acid and control sequences described above are joined together to produce a recombinant expression vector which includes one or more convenient restriction sites to allow for insertion or substitution of the nucleic acid sequence encoding the variant GLA polypeptide at such sites. Alternatively, the polynucleotide sequence(s) of the present invention are expressed by inserting the polynucleotide sequence or a nucleic acid construct comprising the polynucleotide sequence into an appropriate vector for expression. In creating the expression vector, the coding sequence is located in the vector so that the coding sequence is operably linked with the appropriate control sequences for expression.

[0154] The recombinant expression vector may be any vector (e.g., a plasmid or virus including but not limited to adenovirus (AV), adeno-associated virus (AAV), lentivirus (LV), and non-viral vectors, such as liposomes), that can be conveniently subjected to recombinant DNA procedures and can result in the expression of the variant GLA polynucleotide sequence. The choice of the vector will typically depend on the compatibility of the vector with the host cell into which the vector is to be introduced. The vectors may be linear or closed circular plasmids.

[0155] In some embodiments, the expression vector is an autonomously replicating vector (i.e., a vector that exists as an extra-chromosomal entity, the replication of which is independent of chromosomal replication, such as a plasmid, an extra-chromosomal element, a minichromosome, or an artificial chromosome). The vector may contain any means for assuring self-replication. In some alternative embodiments, the vector may be one which, when introduced into the host cell, is integrated into the genome and replicated together with the chromosome(s) into which it has been integrated. Furthermore, a single vector or plasmid or two or more vectors or plasmids which together contain the total DNA to be introduced into the genome of the host cell, or a transposon may be used.

[0156] In some embodiments, the expression vector preferably contains one or more selectable markers, which permit easy selection of transformed cells. A “selectable marker” is a gene the product of which provides for biocide or viral resistance, resistance to heavy metals, prototrophy to auxotrophs, and the like. Suitable markers for yeast host cells include, but are not limited to ADE2, HIS3, LEU2, LYS2, MET3, TRP1, and URA3. Selectable markers for use in a filamentous fungal host cell include, but are not limited to, amdS (acetamidase), argB (ornithine carbamoyltransferases), bar (phosphinothricin acetyltransferase), hph (hygromycin phosphotransferase), niaD (nitrate reductase), pyrG (orotidine-5′-phosphate decarboxylase), sC (sulfate adenyltransferase), and trpC (anthranilate synthase), as well as equivalents thereof. In another aspect, the present invention provides a host cell comprising a polynucleotide encoding at least one engineered GLA polypeptide of the present application, the polynucleotide being operatively linked to one or more control sequences for expression of the engineered GLA enzyme(s) in the host cell. Host cells for use in expressing the polypeptides encoded by the expression vectors of the present invention are well known in the art and include but are not limited to, fungal cells, such as yeast cells (e.g., Saccharomyces cerevisiae and Pichia pastoris [e.g., ATCC Accession No. 201178]); insect cells (e.g., Drosophila S2 and Spodoptera Sf9 cells), plant cells, animal cells (e.g., CHO, CHO-K1, COS, and BHK), and human cells (e.g., HEK293T, human fibroblast, THP-1, Jurkat and Bowes melanoma cell lines).

[0157] Accordingly, in another aspect, the present invention provides methods for producing the engineered GLA polypeptides, where the methods comprise culturing a host cell capable of expressing a polynucleotide encoding the engineered GLA polypeptide under conditions suitable for expression of the polypeptide. In some embodiments, the methods further comprise the steps of isolating and/or purifying the GLA polypeptides, as described herein.

[0158] Appropriate culture media and growth conditions for the above-described host cells are well known in the art. Polynucleotides for expression of the GLA polypeptides may be introduced into cells by various methods known in the art. Techniques include, among others, electroporation, biolistic particle bombardment, liposome mediated transfection, calcium chloride transfection, and protoplast fusion.

[0159] The engineered GLA with the properties disclosed herein can be obtained by subjecting the polynucleotide encoding the naturally occurring or engineered GLA polypeptide to mutagenesis and/or directed evolution methods known in the art, and as described herein. An exemplary directed evolution technique is mutagenesis and/or DNA shuffling (See e.g., Stemmer, Proc. Natl. Acad. Sci. USA 91:10747-10751 [1994]; WO 95/22625; WO 97/0078; WO 97/35966; WO 98/27230; WO 00/42651; WO 01/75767 and U.S. Pat. No. 6,537,746). Other directed evolution procedures that can be used include, among others, staggered extension process (StEP), in vitro recombination (See e.g., Zhao et al., Nat. Biotechnol., 16:258-261 [1998]), mutagenic PCR (See e.g., Caldwell et al., PCR Methods Appl., 3:S136-S140 [1994]), and cassette mutagenesis (See e.g., Black et al., Proc. Natl. Acad. Sci. USA 93:3525-3529 [1996]).

[0160] For example, mutagenesis and directed evolution methods can be readily applied to polynucleotides to generate variant libraries that can be expressed, screened, and assayed. Mutagenesis and directed evolution methods are well known in the art (See e.g., U.S. Pat. Nos. 5,605,793, 5,811,238, 5,830,721, 5,834,252, 5,837,458, 5,928,905, 6,096,548, 6,117,679, 6,132,970, 6,165,793, 6,180,406, 6,251,674, 6,277,638, 6,287,861, 6,287,862, 6,291,242, 6,297,053, 6,303,344, 6,309,883, 6,319,713, 6,319,714, 6,323,030, 6,326,204, 6,335,160, 6,335,198, 6,344,356, 6,352,859, 6,355,484, 6,358,740, 6,358,742, 6,365,377, 6,365,408, 6,368,861, 6,372,497, 6,376,246, 6,379,964, 6,387,702, 6,391,552, 6,391,640, 6,395,547, 6,406,855, 6,406,910, 6,413,745, 6,413,774, 6,420,175, 6,423,542, 6,426,224, 6,436,675, 6,444,468, 6,455,253, 6,479,652, 6,482,647, 6,489,146, 6,506,602, 6,506,603, 6,519,065, 6,521,453, 6,528,311, 6,537,746, 6,573,098, 6,576,467, 6,579,678, 6,586,182, 6,602,986, 6,613,514, 6,653,072, 6,716,631, 6,946,296, 6,961,664, 6,995,017, 7,024,312, 7,058,515, 7,105,297, 7,148,054, 7,288,375, 7,421,347, 7,430,477, 7,534,564, 7,620,500, 7,620,502, 7,629,170, 7,702,464, 7,747,391, 7,747,393, 7,751,986, 7,776,598, 7,783,428, 7,795,030, 7,853,410, 7,868,138, 7,873,499, 7,904,249, 7,957,912, 8,383,346, 8,504,498, 8,849,575, 8,876,066, 8,768,871, 9,593,326, and all related non-US counterparts; Ling et al., Anal. Biochem., 254(2):157-78 [1997]; Dale et al., Meth. Mol. Biol., 57:369-74 [1996]; Smith, Ann. Rev. Genet., 19:423-462 [1985]; Botstein et al., Science, 229:1193-1201 [1985]; Carter, Biochem. J., 237:1-7 [1986]; Kramer et al., Cell, 38:879-887 [1984]; Wells et al., Gene, 34:315-323 [1985]; Minshull et al., Curr. Op. Chem. Biol., 3:284-290 [1999]; Christians et al., Nat. Biotechnol., 17:259-264 [1999]; Crameri et al., Nature, 391:288-291 [1998]; Crameri, et al., Nat. Biotechnol., 15:436-438 [1997]; Zhang et al., Proc. Nat. Acad. Sci. U.S.A., 94:4504-4509 [1997]; Crameri et al., Nat. Biotechnol., 14:315-319 [1996]; Stemmer, Nature, 370:389-391 [1994]; Stemmer, Proc. Nat. Acad. Sci. USA, 91:10747-10751 [1994]; US Pat. Appln. Publn. Nos. 2008/0220990, US 2009/0312196, US2014/0005057, US2014/0214391, US2014/0221216; US2015/0050658, US2015/0133307, US2015/0134315 and all related non-US counterparts; WO 95/22625, WO 97/0078, WO 97/35966, WO 98/27230, WO 00/42651, WO 01/75767, and WO 2009/152336; all of which are incorporated herein by reference).

[0161] In some embodiments, the enzyme variants obtained following mutagenesis treatment are screened by subjecting the enzyme variants to a defined temperature (or other assay conditions) and measuring the amount of enzyme activity remaining after heat treatments or other assay conditions. DNA containing the polynucleotide encoding the GLA polypeptide is then isolated from the host cell, sequenced to identify the nucleotide sequence changes (if any), and used to express the enzyme in a different or the same host cell. Measuring enzyme activity from the expression libraries can be performed using any suitable method known in the art (e.g., standard biochemistry techniques, such as HPLC analysis).

[0162] For engineered polypeptides of known sequence, the polynucleotides encoding the enzyme can be prepared by standard solid-phase methods, according to known synthetic methods. In some embodiments, fragments of up to about 100 bases can be individually synthesized, then joined (e.g., by enzymatic or chemical litigation methods, or polymerase mediated methods) to form any desired continuous sequence. For example, polynucleotides and oligonucleotides disclosed herein can be prepared by chemical synthesis using the classical phosphoramidite method (See e.g., Beaucage et al., Tetra. Lett., 22:1859-69 [1981]; and Matthes et al., EMBO J., 3:801-05 [1984]), as it is typically practiced in automated synthetic methods. According to the phosphoramidite method, oligonucleotides are synthesized (e.g., in an automatic DNA synthesizer), purified, annealed, ligated and cloned in appropriate vectors.

[0163] Accordingly, in some embodiments, a method for preparing the engineered GLA polypeptide can comprise: (a) synthesizing a polynucleotide encoding a polypeptide comprising an amino acid sequence selected from the amino acid sequence of any variant provided in Table 2-1, 5-1, 6-1, 7-1, 8-1, 9-1, 11-1, 12-1, and/or 13-1, as well as SEQ ID NOS: 8, 58, 158, 372, 374, 704, and/or 1022, and (b) expressing the GLA polypeptide encoded by the polynucleotide. In some embodiments of the method, the amino acid sequence encoded by the polynucleotide can optionally have one or several (e.g., up to 3, 4, 5, or up to 10) amino acid residue mutations (e.g., deletions, insertions and/or substitutions). In some embodiments, the amino acid sequence has optionally 1-2, 1-3, 1-4, 1-5, 1-6, 1-7, 1-8, 1-9, 1-10, 1-15, 1-20, 1-21, 1-22, 1-23, 1-24, 1-25, 1-30, 1-35, 1-40, 1-45, or 1-50 amino acid residue mutations (e.g., deletions, insertions and/or substitutions). In some embodiments, the amino acid sequence has optionally 1, 2, 3, 4, 5, 6, 7, 8, 9, 10, 11, 12, 13, 14, 15, 16, 17, 18, 19, 20, 21, 22, 23, 24, 25, 30, 30, 35, 40, 45, or 50 amino acid residue mutations (e.g., deletions, insertions and/or substitutions). In some embodiments, the amino acid sequence has optionally 1, 2, 3, 4, 5, 6, 7, 8, 9, 10, 11, 12, 13, 14, 15, 16, 18, 20, 21, 22, 23, 24, or 25 amino acid residue mutations (e.g., deletions, insertions and/or substitutions). In some embodiments, the substitutions can be conservative or non-conservative substitutions.

[0164] The expressed engineered GLA polypeptide can be assessed for any desired improved property (e.g., activity, selectivity, stability, acid tolerance, protease sensitivity, etc.), using any suitable assay known in the art, including but not limited to the assays and conditions described herein.

[0165] In some embodiments, any of the engineered GLA polypeptides expressed in a host cell are recovered from the cells and/or the culture medium using any one or more of the well-known techniques for protein purification, including, among others, lysozyme treatment, sonication, filtration, salting-out, ultra-centrifugation, and chromatography.

[0166] Chromatographic techniques for isolation of the GLA polypeptides include, among others, reverse phase chromatography high performance liquid chromatography, ion exchange chromatography, hydrophobic interaction chromatography, gel electrophoresis, and affinity chromatography. Conditions for purifying a particular enzyme depends, in part, on factors such as net charge, hydrophobicity, hydrophilicity, molecular weight, molecular shape, etc., and will be apparent to those having skill in the art. In some embodiments, affinity techniques may be used to isolate the improved variant GLA enzymes. In some embodiments utilizing affinity chromatography purification, any antibody which specifically binds the variant GLA polypeptide finds use. In some embodiments utilizing affinity chromatography purification, proteins that bind to the glycans covalently attached to GLA find use. In still other embodiments utilizing affinity-chromatography purifications, any small molecule that binds to the GLA active site finds use. For the production of antibodies, various host animals, including but not limited to rabbits, mice, rats, etc., are immunized by injection with a GLA polypeptide (e.g., a GLA variant), or a fragment thereof. In some embodiments, the GLA polypeptide or fragment is attached to a suitable carrier, such as BSA, by means of a side chain functional group or linkers attached to a side chain functional group.

[0167] In some embodiments, the engineered GLA polypeptide is produced in a host cell by a method comprising culturing a host cell (e.g., S. cerevisiae, Daucus carota, Nicotiana tabacum, H. sapiens (e.g., HEK293T), or Cricetulus griseus (eg., CHO)) comprising a polynucleotide sequence encoding an engineered GLA polypeptide as described herein under conditions conducive to the production of the engineered GLA polypeptide and recovering the engineered GLA polypeptide from the cells and/or culture medium.

[0168] In some embodiments, the invention encompasses a method of producing an engineered GLA polypeptide comprising culturing a recombinant eukaryotic cell comprising a polynucleotide sequence encoding an engineered GLA polypeptide having at least 80%, 81%, 82%, 83%, 84%, 85%, 86%, 87%, 88%, 89%, 90%, 95%, 96%, 97%, 98%, 99%, or 100% sequence identity to a reference sequence (e.g., SEQ ID NO: 8, 58, 158, 372, 374, 704, and/or 1022), and one or more amino acid residue differences as compared to SEQ ID NO: 8, 58, 158, 372, 374, 704, and/or 1022, selected from those provided in Tables 2-1, 5-1, 6-1, 7-1, 8-1, 9-1, 11-1, 12-1, and 13-1, and/or combinations thereof when optimally aligned with the amino acid sequence of SEQ ID NO:8, 58, 158, 372, 374, 704, and/or 1022, under suitable culture conditions to allow the production of the engineered GLA polypeptide and optionally recovering the engineered GLA polypeptide from the culture and/or cultured cells.

[0169] In some embodiments, once the engineered GLA polypeptides are recovered from the recombinant host cells or cell culture medium, they are further purified by any suitable method(s) known in the art. In some additional embodiments, the purified GLA polypeptides are combined with other ingredients and compounds to provide compositions and formulations comprising the engineered GLA polypeptide as appropriate for different applications and uses (e.g., pharmaceutical compositions). In some additional embodiments, the purified engineered GLA polypeptides, or the formulated engineered GLA polypeptides are lyophilized. In some embodiments, the engineered GLA polypeptides are directly produced within a body (i.e., cells within a body, such as a human or another animal) and are not purified. However, in some alternative embodiments, the engineered GLA polypeptides are produced within a body (i.e., cells within a body, such as a human or another animal) and are collected from the body using methods known in the art. In some additional embodiments, these collected engineered GLA polypeptides are purified. In yet some further embodiments, these collected and/or purified engineered polypeptides are introduced into another animal (e.g., human or another animal) or reintroduced into the body that originally produced the collected and/or purified engineered GLA polypeptides.

### Compositions:

[0170] The present invention provides various compositions and formats, including but not limited to those described below. In some embodiments, the present invention provides engineered GLA polypeptides suitable for use in pharmaceutical and other compositions, such as dietary/nutritional supplements.

[0171] Depending on the mode of administration, these compositions comprising a therapeutically effective amount of an engineered GLA according to the invention are in the form of a solid, semi-solid, or liquid. In some embodiments, the compositions include other pharmaceutically acceptable components such as diluents, buffers, excipients, salts, emulsifiers, preservatives, stabilizers, fillers, and other ingredients. Details on techniques for formulation and administration are well known in the art and described in the literature. In some embodiments, these compositions are produced directly in the human body after introduction as gene therapy.

[0172] In some embodiments, the engineered GLA polypeptides are formulated for use in pharmaceutical compositions. Any suitable format for use in delivering the engineered GLA polypeptides find use in the present invention, including but not limited to pills, tablets, gel tabs, capsules, lozenges, dragees, powders, soft gels, sol-gels, gels, emulsions, implants, patches, sprays, ointments, liniments, creams, pastes, jellies, paints, aerosols, chewing gums, demulcents, sticks, solutions, suspensions (including but not limited to oil-based suspensions, oil-in water emulsions, etc.), slurries, syrups, controlled release formulations, suppositories, etc. In some embodiments, the engineered GLA polypeptides are provided in a format suitable for injection or infusion (i.e., in an injectable formulation). In some embodiments, the polynucleotide sequences for the engineered GLA polypeptide is provided in a format suitable for injection. In some embodiments, the engineered GLA polypeptides are provided in biocompatible matrices such as sol-gels, including silica-based (e.g., oxysilane) sol-gels. In some embodiments, the engineered GLA polypeptides are encapsulated. In some alternative embodiments, the engineered GLA polypeptides are encapsulated in nanostructures (e.g., nanotubes, nanotubules, nanocapsules, or microcapsules, microspheres, liposomes, etc.). Indeed, it is not intended that the present invention be limited to any particular delivery formulation and/or means of delivery. It is intended that the engineered GLA polypeptides be administered by any suitable means known in the art, including but not limited to parenteral, oral, topical, transdermal, intranasal, intraocular, intrathecal, via implants, etc.

[0173] In some embodiments, the engineered GLA polypeptides are chemically modified by glycosylation, chemical crosslinking reagents, pegylation (i.e., modified with polyethylene glycol [PEG] or activated PEG, etc.) or other compounds (See e.g., Ikeda, Amino Acids 29:283-287 [2005]; U.S. Pat. Nos. 7,531,341, 7,534,595, 7,560,263, and 7,53,653; US Pat. Appln. Publ. Nos. 2013/0039898, 2012/0177722, etc.). Indeed, it is not intended that the present invention be limited to any particular delivery method and/or mechanism.

[0174] In some additional embodiments, the engineered GLA polypeptides are provided for delivery to cells or tissues via gene therapy, including viral delivery vectors, including but not limited to adenovirus (AV), adeno-associated virus (AAV), lentivirus (LV), or non-viral vectors (e.g., liposomes). In some embodiments, the engineered GLA polypeptides are provided for delivery to cells or tissues via mRNA therapy following formulation of polyribonucleotide sequences in an encapsulated delivery vehicle (e.g., liposomes). In some additional embodiments, the engineered GLA polypeptides are provided for delivery to cells or tissues via cell therapy, where the polynucleotide sequence encoding the engineered GLA polypeptides is introduced into exogenous cell and that cell (or cells) are introduced into a recipient (e.g., a patient exhibiting or at risk for developing Fabry disease).

[0175] In some additional embodiments, the engineered GLA polypeptides are provided in formulations comprising matrix-stabilized enzyme crystals. In some embodiments, the formulation comprises a cross-linked crystalline engineered GLA enzyme and a polymer with a reactive moiety that adheres to the enzyme crystals. The present invention also provides engineered GLA polypeptides in polymers.

[0176] In some embodiments, compositions comprising the engineered GLA polypeptides of the present invention include one or more commonly used carrier compounds, including but not limited to sugars (e.g., lactose, sucrose, mannitol, and/or sorbitol), starches (e.g., corn, wheat, rice, potato, or other plant starch), cellulose (e.g., methyl cellulose, hydroxypropylmethyl cellulose, sodium carboxy-methylcellulose), gums (e.g., arabic, tragacanth, guar, etc.), and/or proteins (e.g., gelatin, collagen, etc.).

[0177] In some embodiments, the present invention provides engineered GLA polypeptides suitable for use in decreasing the concentration of glycolipids in fluids such as blood, cerebrospinal fluid, etc. The dosage of engineered GLA polypeptide(s) administered depends upon the condition or disease, the general condition of the subject, and other factors known to those in the art. In some embodiments, the compositions are intended for single or multiple administrations. In some embodiments, it is contemplated that the concentration of engineered GLA polypeptide(s) in the composition(s) administered to a human with Fabry disease is sufficient to effectively treat, and/or ameliorate disease (e.g., Fabry disease). In some embodiments, the engineered GLA polypeptides are administered in combination with other pharmaceutical and/or dietary compositions.

### Experimental

[0178] The following Examples, including experiments and results achieved, are provided for illustrative purposes only and are not to be construed as limiting the present invention. In the experimental disclosure below, the following abbreviations apply: ppm (parts per million); M (molar); mM (millimolar), uM and μM (micromolar); nM (nanomolar); mol (moles); gm and g (gram); mg (milligrams); ug and μg (micrograms); L and l (liter); ml and mL (milliliter); cm (centimeters); mm (millimeters); um and μm (micrometers); sec. (seconds); min(s) (minute(s)); h(s) and hr(s) (hour(s)); U (units); MW (molecular weight); rpm (rotations per minute); ° C. (degrees Centigrade); SEM (standard error of the mean); IV (intravenous); CDS (coding sequence); DNA (deoxyribonucleic acid); RNA (ribonucleic acid); E. coli W3110 (commonly used laboratory E. coli strain, available from the Coli Genetic Stock Center [CGSC], New Haven, Conn.); NHP (non-human primate); HPLC (high pressure liquid chromatography); MWCO (molecular weight cut-off); SDS-PAGE (sodium dodecyl sulfate polyacrylamide gel electrophoresis);); PBS (phosphate buffered saline); DPBS (Dulbecco's phosphate buffered saline); PES (polyethersulfone); CFSE (carboxyfluorescein succinimidyl ester); IPTG (isopropyl β-D-1-thiogalactopyranoside); PMBS (polymyxin B sulfate); NADPH (nicotinamide adenine dinucleotide phosphate); GIDH (glutamate dehydrogenase); FIOPC (fold improvements over positive control); PBMC (peripheral blood mononuclear cells); LB (Luria broth); MeOH (methanol); Cₘₐₓ (maximal drug concentration during a dosing interval); RFU (relative fluorescence units); AUC₀₋ₜ (area under the curve, up to the last measurable concentration); CL (clearance); Vz (apparent volume of distribution during the terminal phase); TI (test item); Athens Research (Athens Research Technology, Athens, Ga.); ProSpec (ProSpec Tany Technogene, East Brunswick, N.J.); Sigma-Aldrich (Sigma-Aldrich, St. Louis, Mo.); Ram Scientific (Ram Scientific, Inc., Yonkers, N.Y.); Pall Corp. (Pall, Corp., Pt. Washington, N.Y.); Millipore (Millipore, Corp., Billerica Mass.); Difco (Difco Laboratories, BD Diagnostic Systems, Detroit, Mich.); PerkinElmer (PerkinElmer, Waltham, Mass.); Molecular Devices (Molecular Devices, LLC, Sunnyvale, Calif.); Kuhner (Adolf Kuhner, AG, Basel, Switzerland); Axygen (Axygen, Inc., Union City, Calif.); Toronto Research Chemicals (Toronto Research Chemicals Inc., Toronto, Ontario, Canada); Cambridge Isotope Laboratories, (Cambridge Isotope Laboratories, Inc., Tewksbury, Mass.); Applied Biosystems (Applied Biosystems, part of Life Technologies, Corp., Grand Island, N.Y.), Agilent (Agilent Technologies, Inc., Santa Clara, Calif.); Thermo Scientific (part of ThermoFisher Scientific, Waltham, Mass.); Gibco (ThermoFisher Scientific); Pierce (Pierce Biotechnology (now part of Thermo Fisher Scientific), Rockford, Ill.); ThermoFisher Scientific (Thermo Fisher Scientific, Waltham, Mass.); Corning (Corning, Inc., Palo Alto, Calif.); XenoTech (Sekisui XenoTech, LLC, Kansas City, Kans.); Coriell Institute for Medical Research (Coriell Institute for Medical Research, Camden, N.J.); VWR (VWR International, Radnor, Pa.); Jackson (The Jackson Laboratory, Bar Harbor, Me.); Megazyme (Megazyme International, Wicklow, Ireland); Enzo (Enzo Life Sciences, Inc., Farmingdale, N.Y.); GE Healthcare (GE Healthcare Bio-Sciences, Piscataway, N.J.); LI-COR (LI-COR Biotechnology, Lincoln, Nebr.); Amicus (Amicus Therapeutics, Cranbury, N.J.); Phenomenex (Phenomenex, Inc., Torrance, Calif.); Optimal (Optimal Biotech Group, Belmont, Calif.); and Bio-Rad (Bio-Rad Laboratories, Hercules, Calif.).

[0179] The following polynucleotide and polypeptide sequences find use in the present invention. In some cases (as shown below), the polynucleotide sequence is followed by the encoded polypeptide.

Polynucleotide sequence of full length human GLA cDNA (SEQ ID NO. 1):
(SEQ ID NO: 1)
ATGCAGCTGAGGAACCCAGAACTACATCTGGGCTGCGCGCTTGCGCTTCGCTTCCTGGCC
CTCGTTTCCTGGGACATCCCTGGGGCTAGAGCACTGGACAATGGATTGGCAAGGACGCCT
ACCATGGGCTGGCTGCACTGGGAGCGCTTCATGTGCAACCTTGACTGCCAGGAAGAGCC
AGATTCCTGCATCAGTGAGAAGCTCTTCATGGAGATGGCAGAGCTCATGGTCTCAGAAG
GCTGGAAGGATGCAGGTTATGAGTACCTCTGCATTGATGACTGTTGGATGGCTCCCCAAA
GAGATTCAGAAGGCAGACTTCAGGCAGACCCTCAGCGCTTTCCTCATGGGATTCGCCAGC
TAGCTAATTATGTTCACAGCAAAGGACTGAAGCTAGGGATTTATGCAGATGTTGGAAAT
AAAACCTGCGCAGGCTTCCCTGGGAGTTTTGGATACTACGACATTGATGCCCAGACCTTT
GCTGACTGGGGAGTAGATCTGCTAAAATTTGATGGTTGTTACTGTGACAGTTTGGAAAAT
TTGGCAGATGGTTATAAGCACATGTCCTTGGCCCTGAATAGGACTGGCAGAAGCATTGTG
TACTCCTGTGAGTGGCCTCTTTATATGTGGCCCTTTCAAAAGCCCAATTATACAGAAATC
CGACAGTACTGCAATCACTGGCGAAATTTTGCTGACATTGATGATTCCTGGAAAAGTATA
AAGAGTATCTTGGACTGGACATCTTTTAACCAGGAGAGAATTGTTGATGTTGCTGGACCA
GGGGGTTGGAATGACCCAGATATGTTAGTGATTGGCAACTTTGGCCTCAGCTGGAATCAG
CAAGTAACTCAGATGGCCCTCTGGGCTATCATGGCTGCTCCTTTATTCATGTCTAATGACC
TCCGACACATCAGCCCTCAAGCCAAAGCTCTCCTTCAGGATAAGGACGTAATTGCCATCA
ATCAGGACCCCTTGGGCAAGCAAGGGTACCAGCTTAGACAGGGAGACAACTTTGAAGTG
TGGGAACGACCTCTCTCAGGCTTAGCCTGGGCTGTAGCTATGATAAACCGGCAGGAGATT
GGTGGACCTCGCTCTTATACCATCGCAGTTGCTTCCCTGGGTAAAGGAGTGGCCTGTAAT
CCTGCCTGCTTCATCACACAGCTCCTCCCTGTGAAAAGGAAGCTAGGGTTCTATGAATGG
ACTTCAAGGTTAAGAAGTCACATAAATCCCACAGGCACTGTTTTGCTTCAGCTAGAAAAT
ACAATGCAGATGTCATTAAAAGACTTACTTTAG
Polypeptide sequence of full length human GLA:
(SEQ ID NO: 2)
MQLRNPELHLGCALALRFLALVSWDIPGARALDNGLARTPTMGWLHWERFMCNLDCQEEP
DSCISEKLFMEMAELMVSEGWKDAGYEYLCIDDCWMAPQRDSEGRLQADPQRFPHGIRQLA
NYVHSKGLKLGIYADVGNKTCAGFPGSFGYYDIDAQTFADWGVDLLKFDGCYCDSLENLAD
GYKHMSLALNRTGRSIVYSCEWPLYMWPFQKPNYTEIRQYCNHWRNFADIDDSWKSIKSILD
WTSFNQERIVDVAGPGGWNDPDMLVIGNFGLSWNQQVTQMALWAIMAAPLFMSNDLRHIS
PQAKALLQDKDVIAINQDPLGKQGYQLRQGDNFEVWERPLSGLAWAVAMINRQEIGGPRSY
TIAVASLGKGVACNPACFITQLLPVKRKLGFYEWTSRLRSHINPTGTVLLQLENTMQMSLKD
LL
Polynucleotide sequence of mature yeast codon-optimized (yCDS) human GLA:
(SEQ ID NO: 3)
TTGGATAACGGGTTAGCCCGTACACCTACTATGGGTTGGCTTCACTGGGAAAGATTCATG
TGTAACTTAGATTGCCAAGAAGAGCCTGACAGCTGTATCTCAGAGAAACTATTCATGGA
GATGGCTGAACTAATGGTAAGTGAAGGATGGAAGGATGCTGGTTATGAATACCTATGTA
TTGATGATTGCTGGATGGCTCCACAGCGTGATTCAGAAGGTAGGTTACAAGCTGACCCCC
AGAGATTCCCACATGGCATACGTCAGCTTGCAAACTACGTACACAGCAAGGGTCTAAAG
TTAGGCATCTACGCTGATGTCGGAAACAAGACATGTGCTGGTTTCCCAGGTTCATTCGGT
TACTATGACATAGATGCGCAGACGTTTGCTGATTGGGGTGTTGATTTGTTGAAGTTTGAT
GGATGCTACTGCGATTCCCTGGAGAACCTAGCCGATGGGTACAAACACATGAGTTTGGCT
CTAAACAGGACTGGTAGGAGCATCGTCTATAGTTGTGAATGGCCCTTGTACATGTGGCCG
TTTCAGAAGCCAAACTACACTGAGATAAGACAATACTGTAACCATTGGCGTAACTTTGCT
GACATAGATGATTCATGGAAGTCAATCAAATCTATCTTGGATTGGACTTCTTTCAACCAG
GAAAGAATTGTTGATGTTGCAGGTCCAGGTGGATGGAATGACCCTGATATGCTTGTCATA
GGGAACTTTGGGCTATCATGGAATCAACAAGTTACACAAATGGCTTTGTGGGCGATCATG
GCCGCACCCCTATTCATGTCTAATGATCTACGTCACATATCACCCCAAGCAAAGGCTTTA
CTTCAAGATAAGGATGTCATAGCGATCAACCAAGATCCTCTTGGTAAACAAGGTTATCAA
TTGAGACAAGGTGACAACTTTGAAGTGTGGGAAAGACCATTGTCTGGACTTGCGTGGGC
TGTTGCTATGATCAACCGTCAAGAGATCGGAGGGCCAAGATCTTACACTATCGCGGTAGC
CTCTTTGGGTAAGGGTGTTGCGTGCAATCCTGCCTGCTTCATTACACAATTGCTTCCAGTT
AAGAGAAAGTTGGGTTTCTATGAGTGGACATCTAGGCTAAGAAGTCACATCAATCCTACT
GGTACGGTATTGTTGCAATTGGAGAACACAATGCAAATGTCTTTGAAAGATTTGTTA
Polynucleotide sequence of mature human GLA (native hCDS):
(SEQ ID NO: 4)
CTGGACAATGGATTGGCAAGGACGCCTACCATGGGCTGGCTGCACTGGGAGCGCTTCAT
GTGCAACCTTGACTGCCAGGAAGAGCCAGATTCCTGCATCAGTGAGAAGCTCTTCATGG
AGATGGCAGAGCTCATGGTCTCAGAAGGCTGGAAGGATGCAGGTTATGAGTACCTCTGC
ATTGATGACTGTTGGATGGCTCCCCAAAGAGATTCAGAAGGCAGACTTCAGGCAGACCC
TCAGCGCTTTCCTCATGGGATTCGCCAGCTAGCTAATTATGTTCACAGCAAAGGACTGAA
GCTAGGGATTTATGCAGATGTTGGAAATAAAACCTGCGCAGGCTTCCCTGGGAGTTTTGG
ATACTACGACATTGATGCCCAGACCTTTGCTGACTGGGGAGTAGATCTGCTAAAATTTGA
TGGTTGTTACTGTGACAGTTTGGAAAATTTGGCAGATGGTTATAAGCACATGTCCTTGGC
CCTGAATAGGACTGGCAGAAGCATTGTGTACTCCTGTGAGTGGCCTCTTTATATGTGGCC
CTTTCAAAAGCCCAATTATACAGAAATCCGACAGTACTGCAATCACTGGCGAAATTTTGC
TGACATTGATGATTCCTGGAAAAGTATAAAGAGTATCTTGGACTGGACATCTTTTAACCA
GGAGAGAATTGTTGATGTTGCTGGACCAGGGGGTTGGAATGACCCAGATATGTTAGTGA
TTGGCAACTTTGGCCTCAGCTGGAATCAGCAAGTAACTCAGATGGCCCTCTGGGCTATCA
TGGCTGCTCCTTTATTCATGTCTAATGACCTCCGACACATCAGCCCTCAAGCCAAAGCTCT
CCTTCAGGATAAGGACGTAATTGCCATCAATCAGGACCCCTTGGGCAAGCAAGGGTACC
AGCTTAGACAGGGAGACAACTTTGAAGTGTGGGAACGACCTCTCTCAGGCTTAGCCTGG
GCTGTAGCTATGATAAACCGGCAGGAGATTGGTGGACCTCGCTCTTATACCATCGCAGTT
GCTTCCCTGGGTAAAGGAGTGGCCTGTAATCCTGCCTGCTTCATCACACAGCTCCTCCCT
GTGAAAAGGAAGCTAGGGTTCTATGAATGGACTTCAAGGTTAAGAAGTCACATAAATCC
CACAGGCACTGTTTTGCTTCAGCTAGAAAATACAATGCAGATGTCATTAAAAGACTTACT
T
Polypeptide sequence of mature Human GLA:
(SEQ ID NO: 5)
LDNGLARTPTMGWLHWERFMCNLDCQEEPDSCISEKLFMEMAELMVSEGWKDAGYEYLCI
DDCWMAPQRDSEGRLQADPQRFPHGIRQLANYVHSKGLKLGIYADVGNKTCAGFPGSFGYY
DIDAQTFADWGVDLLKFDGCYCDSLENLADGYKHMSLALNRTGRSIVYSCEWPLYMWPFQ
KPNYTEIRQYCNHWRNFADIDDSWKSIKSILDWTSFNQERIVDVAGPGGWNDPDMLVIGNFG
LSWNQQVTQMALWAIMAAPLFMSNDLRHISPQAKALLQDKDVIAINQDPLGKQGYQLRQG
DNFEVWERPLSGLAWAVAMINRQEIGGPRSYTIAVASLGKGVACNPACFITQLLPVKRKLGF
YEWTSRLRSHINPTGTVLLQLENTMQMSLKDLL
Polynucleotide sequence of pCK110900i E. coli expression vector:
(SEQ ID NO: 6)
TCGAGTTAATTAAGGCAGTGAGCGCAACGCAATTAATGTGAGTTAGCTCACTCATTAGGC
ACCCCAGGCTTTACACTTTATGCTTCCGGCTCGTATGTTGTGTGGAATTGTGAGCGGATA
ACAATTTCACACAGGAAACGGCTATGACCATGATTACGGATTCACTGGCCGTCGTTTTAC
AATCTAGAGGCCAGCCTGGCCATAAGGAGATATACATATGAGTATTCAACATTTCCGTGT
CGCCCTTATTCCCTTTTCTGCGGCATTTTGCCTTCCTGTTTTTGCTCACCCAGAAACGCTG
GTGAAAGTAAAAGATGCTGAAGATCAGTTGGGTGCACGAGTGGGTTACATCGAACTGGA
TCTCAACAGCGGTAAGATCCTTGAGAGTTTTCGCCCCGAAGAGCGTTTTCCAATGATGAG
CACTTTTAAAGTTCTGCTATGTGGCGCGGTATTATCCCGTGTTGACGCCGGGCAAGAGCA
ACTCGGTCGCCGCATACACTATTCTCAGAATGACTTGGTTGAGTACTCACCAGTCACAGA
AAAGCATCTTACGGATGGCATGACAGTAAGAGAATTATGCAGTGCTGCCATAACCATGA
GTGATAACACTGCGGCCAACTTACTTCTGACAACGATCGGAGGACCGAAGGAGCTAACC
GTTTTTTTGCACACCATGGGGGATCATGTAACTCGCCTTGATCGTTGGGAACCGGAGCTG
AATGAAGCCATACCAAACGACGAGCGTGACACCACGATGCCTACAGCAATGGCAACAAC
GTTGCGCAAACTATTAACTGGCGAACTACTTACTCTAGCTTCCCGGCAACAATTAATAGA
CTGGATGGAGGCGGATAAAGTTGCAGGACCACTTCTGCGCTCGGCCCTTCCGGCTGGCTG
GTTTATTGCTGATAAATCTGGAGCCGGTGAGCGTGGGTCTCGCGGTATCATTGCAGCACT
GGGGCCAGATGGTAAGCCCTCCCGTATCGTAGTTATCTACACGACGGGGAGTCAGGCAA
CTATGGATGAACGTAATAGACAGATCGCTGAGATAGGTGCCTCACTGATTAAGCATTGG
GGCCAAACTGGCCACCATCACCATCACCATTAGGGAAGAGCAGATGGGCAAGCTTGACC
TGTGAAGTGAAAAATGGCGCACATTGTGCGACATTTTTTTTTGAATTCTACGTAAAAAGC
CGCCGATACATCGGCTGCTTTTTTTTTGATAGAGGTTCAAACTTGTGGTATAATGAAATA
AGATCACTCCGGGGCGTATTTTTTGAGTTATCGAGATTTTCAGGAGCTAAGGAAGCTAAA
ATGGAGAAAAAAATCACTGGATATACCACCGTTGATATATCCCAATGGCATCGTAAAGA
ACATTTTGAGGCATTTCAGTCAGTTGCTCAATGTACCTATAACCAGACCGTTCAGCTGGA
TATTACGGCCTTTTTAAAGACCGTAAAGAAAAATAAGCACAAGTTTTATCCGGCCTTTAT
TCACATTCTTGCCCGCCTGATGAATGCTCATCCGGAGTTCCGTATGGCAATGAAAGACGG
TGAGCTGGTGATATGGGATAGTGTTCACCCTTGTTACACCGTTTTCCATGAGCAAACTGA
AACGTTTTCATCGCTCTGGAGTGAATACCACGACGATTTCCGGCAGTTTCTACACATATA
TTCGCAAGATGTGGCGTGTTACGGTGAAAACCTGGCCTATTTCCCTAAAGGGTTTATTGA
GAATATGTTTTTCGTCTCAGCCAATCCCTGGGTGAGTTTCACCAGTTTTGATTTAAACGTG
GCCAATATGGACAACTTCTTCGCCCCCGTTTTCACCATGGGCAAATATTATACGCAAGGC
GACAAGGTGCTGATGCCGCTGGCGATTCAGGTTCATCATGCCGTCTGTGATGGCTTCCAT
GTCGGCAGAATGCTTAATGAATTACAACAGTACTGCGATGAGTGGCAGGGCGGGGCGTA
ACTGCAGGAGCTCAAACAGCAGCCTGTATTCAGGCTGCTTTTTTCGTTTTGGTCTGCGCGT
AATCTCTTGCTCTGAAAACGAAAAAACCGCCTTGCAGGGCGGTTTTTCGAAGGTTCTCTG
AGCTACCAACTCTTTGAACCGAGGTAACTGGCTTGGAGGAGCGCAGTCACCAAAACTTG
TCCTTTCAGTTTAGCCTTAACCGGCGCATGACTTCAAGACTAACTCCTCTAAATCAATTAC
CAGTGGCTGCTGCCAGTGGTGCTTTTGCATGTCTTTCCGGGTTGGACTCAAGACGATAGT
TACCGGATAAGGCGCAGCGGTCGGACTGAACGGGGGGTTCGTGCATACAGTCCAGCTTG
GAGCGAACTGCCTACCCGGAACTGAGTGTCAGGCGTGGAATGAGACAAACGCGGCCATA
ACAGCGGAATGACACCGGTAAACCGAAAGGCAGGAACAGGAGAGCGCACGAGGGAGCC
GCCAGGGGGAAACGCCTGGTATCTTTATAGTCCTGTCGGGTTTCGCCACCACTGATTTGA
GCGTCAGATTTCGTGATGCTTGTCAGGGGGGCGGAGCCTATGGAAAAACGGCTTTGCCG
CGGCCCTCTCACTTCCCTGTTAAGTATCTTCCTGGCATCTTCCAGGAAATCTCCGCCCCGT
TCGTAAGCCATTTCCGCTCGCCGCAGTCGAACGACCGAGCGTAGCGAGTCAGTGAGCGA
GGAAGCGGAATATATCCTGTATCACATATTCTGCTGACGCACCGGTGCAGCCTTTTTTCT
CCTGCCACATGAAGCACTTCACTGACACCCTCATCAGTGAACCACCGCTGGTAGCGGTGG
TTTTTTTAGGCCTATGGCCTTTTTTTTTTGTGGGAAACCTTTCGCGGTATGGTATTAAAGC
GCCCGGAAGAGAGTCAATTCAGGGTGGTGAATGTGAAACCAGTAACGTTATACGATGTC
GCAGAGTATGCCGGTGTCTCTTATCAGACCGTTTCCCGCGTGGTGAACCAGGCCAGCCAC
GTTTCTGCGAAAACGCGGGAAAAAGTGGAAGCGGCGATGGCGGAGCTGAATTACATTCC
CAACCGCGTGGCACAACAACTGGCGGGCAAACAGTCGTTGCTGATTGGCGTTGCCACCT
CCAGTCTGGCCCTGCACGCGCCGTCGCAAATTGTCGCGGCGATTAAATCTCGCGCCGATC
AACTGGGTGCCAGCGTGGTGGTGTCGATGGTAGAACGAAGCGGCGTCGAAGCCTGTAAA
GCGGCGGTGCACAATCTTCTCGCGCAACGCGTCAGTGGGCTGATCATTAACTATCCGCTG
GATGACCAGGATGCCATTGCTGTGGAAGCTGCCTGCACTAATGTTCCGGCGTTATTTCTT
GATGTCTCTGACCAGACACCCATCAACAGTATTATTTTCTCCCATGAAGACGGTACGCGA
CTGGGCGTGGAGCATCTGGTCGCATTGGGTCACCAGCAAATCGCGCTGTTAGCGGGCCC
ATTAAGTTCTGTCTCGGCGCGTCTGCGTCTGGCTGGCTGGCATAAATATCTCACTCGCAA
TCAAATTCAGCCGATAGCGGAACGGGAAGGCGACTGGAGTGCCATGTCCGGTTTTCAAC
AAACCATGCAAATGCTGAATGAGGGCATCGTTTCCACTGCGATGCTGGTTGCCAACGATC
AGATGGCGCTGGGCGCAATGCGCGCCATTACCGAGTCCGGGCTGCGCGTTGGTGCGGAC
ATCTCGGTAGTGGGATACGACGATACCGAAGACAGCTCATGTTATATCCCGCCGTTAACC
ACCATCAAACAGGATTTTCGCCTGCTGGGGCAAACCAGCGTGGACCGCTTGCTGCAACTC
TCTCAGGGCCAGGCGGTTAAGGGCAATCAGCTGTTGCCCGTCTCACTGGTGAAAAGAAA
AACCACCCTGGCGCCCAATACGCAAACCGCCTCTCCCCGCGCGTTGGCCGATTCATTAAT
GCAGCTGGCACGACAGGTTTCCCGACTGGAAAGCGGGCAGTGAGCGGTACCCGATAAAA
GCGGCTTCCTGACAGGAGGCCGTTTTGTTTC
Polynucleotide sequence of pYT-72Bg1 secreted yeast expression vector:
(SEQ ID NO: 7)
TTTTTTTTTTTTTTTTTTTTTTTTTTTTTTTTTTTTTTTTTTTTTTTTTTTGTACAAATATCATA
AAAAAAGAGAATCTTTTTAAGCAAGGATTTTCTTAACTTCTTCGGCGACAGCATCACCGA
CTTCGGTGGTACTGTTGGAACCACCTAAATCACCAGTTCTGATACCTGCATCCAAAACCT
TTTTAACTGCATCTTCAATGGCTTTACCTTCTTCAGGCAAGTTCAATGACAATTTCAACAT
CATTGCAGCAGACAAGATAGTGGCGATAGGGTTGACCTTATTCTTTGGCAAATCTGGAGC
GGAACCATGGCATGGTTCGTACAAACCAAATGCGGTGTTCTTGTCTGGCAAAGAGGCCA
AGGACGCAGATGGCAACAAACCCAAGGAGCCTGGGATAACGGAGGCTTCATCGGAGAT
GATATCACCAAACATGTTGCTGGTGATTATAATACCATTTAGGTGGGTTGGGTTCTTAAC
TAGGATCATGGCGGCAGAATCAATCAATTGATGTTGAACTTTCAATGTAGGGAATTCGTT
CTTGATGGTTTCCTCCACAGTTTTTCTCCATAATCTTGAAGAGGCCAAAACATTAGCTTTA
TCCAAGGACCAAATAGGCAATGGTGGCTCATGTTGTAGGGCCATGAAAGCGGCCATTCT
TGTGATTCTTTGCACTTCTGGAACGGTGTATTGTTCACTATCCCAAGCGACACCATCACCA
TCGTCTTCCTTTCTCTTACCAAAGTAAATACCTCCCACTAATTCTCTAACAACAACGAAGT
CAGTACCTTTAGCAAATTGTGGCTTGATTGGAGATAAGTCTAAAAGAGAGTCGGATGCA
AAGTTACATGGTCTTAAGTTGGCGTACAATTGAAGTTCTTTACGGATTTTTAGTAAACCTT
GTTCAGGTCTAACACTACCGGTACCCCATTTAGGACCACCCACAGCACCTAACAAAACG
GCATCAGCCTTTTTGGAGGCTTCCAGCGCCTCATTTGGAAGTGGAACACCTGTAGCATCG
ATAGCAGCCCCCCCAATTAAATGATTTTCGAAATCGAACTTGACATTGGAACGAACATCA
GAAATAGCTTTAAGAACCTTAATGGCTTCGGCTGTGATTTCTTGACCAACGTGGTCACCT
GGCAAAACGACGATTTTTTTAGGGGCAGACATTACAATGGTATATCCTTGAAATATATAT
AAAAAAAAAAAAAAAAAAAAAAAAAAAAAAATGCAGCTTCTCAATGATATTCGAATAC
GCTTTGAGGAGATACAGCCTAATATCCGACAAACTGTTTTACAGATTTACGATCGTACTT
GTTACCCATCATTGAATTTTGAACATCCGAACCTGGGAGTTTTCCCTGAAACAGATAGTA
TATTTGAACCTGTATAATAATATATAGTCTAGCGCTTTACGGAAGACAATGTATGTATTT
CGGTTCCTGGAGAAACTATTGCATCTATTGCATAGGTAATCTTGCACGTCGCATCCCCGG
TTCATTTTCTGCGTTTCCATCTTGCACTTCAATAGCATATCTTTGTTAACGAAGCATCTGT
GCTTCATTTTGTAGAACAAAAATGCAACGCGAGAGCGCTAATTTTTCAAACAAAGAATCT
GAGCTGCATTTTTACAGAACAGAAATGCAACGCGAAAGCGCTATTTTACCAACGAAGAA
TCTGTGCTTCATTTTTGTAAAACAAAAATGCAACGCGAGAGCGCTAATTTTTCAAACAAA
GAATCTGAGCTGCATTTTTACAGAACAGAAATGCAACGCGAGAGCGCTATTTTACCAAC
AAAGAATCTATACTTCTTTTTTGTTCTACAAAAATGCATCCCGAGAGCGCTATTTTTCTAA
CAAAGCATCTTAGATTACTTTTTTTCTCCTTTGTGCGCTCTATAATGCAGTCTCTTGATAA
CTTTTTGCACTGTAGGTCCGTTAAGGTTAGAAGAAGGCTACTTTGGTGTCTATTTTCTCTT
CCATAAAAAAAGCCTGACTCCACTTCCCGCGTTTACTGATTACTAGCGAAGCTGCGGGTG
CATTTTTTCAAGATAAAGGCATCCCCGATTATATTCTATACCGATGTGGATTGCGCATACT
TTGTGAACAGAAAGTGATAGCGTTGATGATTCTTCATTGGTCAGAAAATTATGAACGGTT
TCTTCTATTTTGTCTCTATATACTACGTATAGGAAATGTTTACATTTTCGTATTGTTTTCGA
TTCACTCTATGAATAGTTCTTACTACAATTTTTTTGTCTAAAGAGTAATACTAGAGATAAA
CATAAAAAATGTAGAGGTCGAGTTTAGATGCAAGTTCAAGGAGCGAAAGGTGGATGGGT
AGGTTATATAGGGATATAGCACAGAGATATATAGCAAAGAGATACTTTTGAGCAATGTT
TGTGGAAGCGGTATTCGCAATATTTTAGTAGCTCGTTACAGTCCGGTGCGTTTTTGGTTTT
TTGAAAGTGCGTCTTCAGAGCGCTTTTGGTTTTCAAAAGCGCTCTGAAGTTCCTATACTTT
CTAGAGAATAGGAACTTCGGAATAGGAACTTCAAAGCGTTTCCGAAAACGAGCGCTTCC
GAAAATGCAACGCGAGCTGCGCACATACAGCTCACTGTTCACGTCGCACCTATATCTGCG
TGTTGCCTGTATATATATATACATGAGAAGAACGGCATAGTGCGTGTTTATGCTTAAATG
CGTACTTATATGCGTCTATTTATGTAGGATGAAAGGTAGTCTAGTACCTCCTGTGATATTA
TCCCATTCCATGCGGGGTATCGTATGCTTCCTTCAGCACTACCCTTTAGCTGTTCTATATG
CTGCCACTCCTCAATTGGATTAGTCTCATCCTTCAATGCTATCATTTCCTTTGATATTGGA
TCATATGCATAGTACCGAGAAACTAGTGCGAAGTAGTGATCAGGTATTGCTGTTATCTGA
TGAGTATACGTTGTCCTGGCCACGGCAGAAGCACGCTTATCGCTCCAATTTCCCACAACA
TTAGTCAACTCCGTTAGGCCCTTCATTGAAAGAAATGAGGTCATCAAATGTCTTCCAATG
TGAGATTTTGGGCCATTTTTTATAGCAAAGATTGAATAAGGCGCATTTTTCTTCAAAGCTT
TATTGTACGATCTGACTAAGTTATCTTTTAATAATTGGTATTCCTGTTTATTGCTTGAAGA
ATTGCCGGTCCTATTTACTCGTTTTAGGACTGGTTCAGAATTCCTCAAAAATTCATCCAAA
TATACAAGTGGATCGATGATAAGCTGTCAAACATGAGAATTCTTGAAGACGAAAGGGCC
TCGTGATACGCCTATTTTTATAGGTTAATGTCATGATAATAATGGTTTCTTAGACGTCAGG
TGGCACTTTTCGGGGAAATGTGCGCGGAACCCCTATTTGTTTATTTTTCTAAATACATTCA
AATATGTATCCGCTCATGAGACAATAACCCTGATAAATGCTTCAATAATATTGAAAAAGG
AAGAGTATGAGTATTCAACATTTCCGTGTCGCCCTTATTCCCTTTTTTGCGGCATTTTGCC
TTCCTGTTTTTGCTCACCCAGAAACGCTGGTGAAAGTAAAAGATGCTGAAGATCAGTTGG
GTGCACGAGTGGGTTACATCGAACTGGATCTCAACAGCGGTAAGATCCTTGAGAGTTTTC
GCCCCGAAGAACGTTTTCCAATGATGAGCACTTTTAAAGTTCTGCTATGTGGCGCGGTAT
TATCCCGTGTTGACGCCGGGCAAGAGCAACTCGGTCGCCGCATACACTATTCTCAGAATG
ACTTGGTTGAGTACTCACCAGTCACAGAAAAGCATCTTACGGATGGCATGACAGTAAGA
GAATTATGCAGTGCTGCCATAACCATGAGTGATAACACTGCGGCCAACTTACTTCTGACA
ACGATCGGAGGACCGAAGGAGCTAACCGCTTTTTTGCACAACATGGGGGATCATGTAAC
TCGCCTTGATCGTTGGGAACCGGAGCTGAATGAAGCCATACCAAACGACGAGCGTGACA
CCACGATGCCTGCAGCAATGGCAACAACGTTGCGCAAACTATTAACTGGCGAACTACTT
ACTCTAGCTTCCCGGCAACAATTAATAGACTGGATGGAGGCGGATAAAGTTGCAGGACC
ACTTCTGCGCTCGGCCCTTCCGGCTGGCTGGTTTATTGCTGATAAATCTGGAGCCGGTGA
GCGTGGGTCTCGCGGTATCATTGCAGCACTGGGGCCAGATGGTAAGCCCTCCCGTATCGT
AGTTATCTACACGACGGGGAGTCAGGCAACTATGGATGAACGAAATAGACAGATCGCTG
AGATAGGTGCCTCACTGATTAAGCATTGGTAACTGTCAGACCAAGTTTACTCATATATAC
TTTAGATTGATTTAAAACTTCATTTTTAATTTAAAAGGATCTAGGTGAAGATCCTTTTTGA
TAATCTCATGACCAAAATCCCTTAACGTGAGTTTTCGTTCCACTGAGCGTCAGACCCCGT
AGAAAAGATCAAAGGATCTTCTTGAGATCCTTTTTTTCTGCGCGTAATCTGCTGCTTGCA
AACAAAAAAACCACCGCTACCAGCGGTGGTTTGTTTGCCGGATCAAGAGCTACCAACTC
TTTTTCCGAAGGTAACTGGCTTCAGCAGAGCGCAGATACCAAATACTGTCCTTCTAGTGT
AGCCGTAGTTAGGCCACCACTTCAAGAACTCTGTAGCACCGCCTACATACCTCGCTCTGC
TAATCCTGTTACCAGTGGCTGCTGCCAGTGGCGATAAGTCGTGTCTTACCGGGTTGGACT
CAAGACGATAGTTACCGGATAAGGCGCAGCGGTCGGGCTGAACGGGGGGTTCGTGCACA
CAGCCCAGCTTGGAGCGAACGACCTACACCGAACTGAGATACCTACAGCGTGAGCTATG
AGAAAGCGCCACGCTTCCCGAAGGGAGAAAGGCGGACAGGTATCCGGTAAGCGGCAGG
GTCGGAACAGGAGAGCGCACGAGGGAGCTTCCAGGGGGAAACGCCTGGTATCTTTATAG
TCCTGTCGGGTTTCGCCACCTCTGACTTGAGCGTCGATTTTTGTGATGCTCGTCAGGGGGG
CGGAGCCTATGGAAAAACGCCAGCAACGCGGCCTTTTTACGGTTCCTGGCCTTTTGCTGG
CCTTTTGCTCACATGTTCTTTCCTGCGTTATCCCCTGATTCTGTGGATAACCGTATTACCG
CCTTTGAGTGAGCTGATACCGCTCGCCGCAGCCGAACGACCGAGCGCAGCGAGTCAGTG
AGCGAGGAAGCGGAAGAGCGCCTGATGCGGTATTTTCTCCTTACGCATCTGTGCGGTATT
TCACACCGCATATGGTGCACTCTCAGTACAATCTGCTCTGATGCCGCATAGTTAAGCCAG
TATACACTCCGCTATCGCTACGTGACTGGGTCATGGCTGCGCCCCGACACCCGCCAACAC
CCGCTGACGCGCCCTGACGGGCTTGTCTGCTCCCGGCATCCGCTTACAGACAAGCTGTGA
CCGTCTCCGGGAGCTGCATGTGTCAGAGGTTTTCACCGTCATCACCGAAACGCGCGAGGC
AGCTGCGGTAAAGCTCATCAGCGTGGTCGTGAAGCGATTCACAGATGTCTGCCTGTTCAT
CCGCGTCCAGCTCGTTGAGTTTCTCCAGAAGCGTTAATGTCTGGCTTCTGATAAAGCGGG
CCATGTTAAGGGCGGTTTTTTCCTGTTTGGTCACTGATGCCTCCGTGTAAGGGGGATTTCT
GTTCATGGGGGTAATGATACCGATGAAACGAGAGAGGATGCTCACGATACGGGTTACTG
ATGATGAACATGCCCGGTTACTGGAACGTTGTGAGGGTAAACAACTGGCGGTATGGATG
CGGCGGGACCAGAGAAAAATCACTCAGGGTCAATGCCAGCGCTTCGTTAATACAGATGT
AGGTGTTCCACAGGGTAGCCAGCAGCATCCTGCGATGCAGATCCGGAACATAATGGTGC
AGGGCGCTGACTTCCGCGTTTCCAGACTTTACGAAACACGGAAACCGAAGACCATTCAT
GTTGTTGCTCAGGTCGCAGACGTTTTGCAGCAGCAGTCGCTTCACGTTCGCTCGCGTATC
GGTGATTCATTCTGCTAACCAGTAAGGCAACCCCGCCAGCCTAGCCGGGTCCTCAACGAC
AGGAGCACGATCATGCGCACCCGTGGCCAGGACCCAACGCTGCCCGAGATGCGCCGCGT
GCGGCTGCTGGAGATGGCGGACGCGATGGATATGTTCTGCCAAGGGTTGGTTTGCGCATT
CACAGTTCTCCGCAAGAATTGATTGGCTCCAATTCTTGGAGTGGTGAATCCGTTAGCGAG
GTGCCGCCGGCTTCCATTCAGGTCGAGGTGGCCCGGCTCCATGCACCGCGACGCAACGC
GGGGAGGCAGACAAGGTATAGGGCGGCGCCTACAATCCATGCCAACCCGTTCCATGTGC
TCGCCGAGGCGGCATAAATCGCCGTGACGATCAGCGGTCCAATGATCGAAGTTAGGCTG
GTAAGAGCCGCGAGCGATCCTTGAAGCTGTCCCTGATGGTCGTCATCTACCTGCCTGGAC
AGCATGGCCTGCAACGCGGGCATCCCGATGCCGCCGGAAGCGAGAAGAATCATAATGGG
GAAGGCCATCCAGCCTCGCGTCGCGAACGCCAGCAAGACGTAGCCCAGCGCGTCGGCCG
CCATGCCGGCGATAATGGCCTGCTTCTCGCCGAAACGTTTGGTGGCGGGACCAGTGACG
AAGGCTTGAGCGAGGGCGTGCAAGATTCCGAATACCGCAAGCGACAGGCCGATCATCGT
CGCGCTCCAGCGAAAGCGGTCCTCGCCGAAAATGACCCAGAGCGCTGCCGGCACCTGTC
CTACGAGTTGCATGATAAAGAAGACAGTCATAAGTGCGGCGACGATAGTCATGCCCCGC
GCCCACCGGAAGGAGCTGACTGGGTTGAAGGCTCTCAAGGGCATCGGTCGAGGATCTGG
GCAAAACGTAGGGGCAAACAAACGGAAAAATCGTTTCTCAAATTTTCTGATGCCAAGAA
CTCTAACCAGTCTTATCTAAAAATTGCCTTATGATCCGTCTCTCCGGTTACAGCCTGTGTA
ACTGATTAATCCTGCCTTTCTAATCACCATTCTAATGTTTTAATTAAGGGATTTTGTCTTC
ATTAACGGCTTTCGCTCATAAAAATGTTATGACGTTTTGCCCGCAGGCGGGAAACCATCC
ACTTCACGAGACTGATCTCCTCTGCCGGAACACCGGGCATCTCCAACTTATAAGTTGGAG
AAATAAGAGAATTTCAGATTGAGAGAATGAAAAAAAAAAAAAAAAAAAGGCAGAGGAG
AGCATAGAAATGGGGTTCACTTTTTGGTAAAGCTATAGCATGCCTATCACATATAAATAG
AGTGCCAGTAGCGACTTTTTTCACACTCGAAATACTCTTACTACTGCTCTCTTGTTGTTTT
TATCACTTCTTGTTTCTTCTTGGTAAATAGAATATCAAGCTACAAAAAGCATACAATCAA
CTATCAACTATTAACTATATCGTAATACACAGGATCCACCATGAAGGCTGCTGCGCTTTC
CTGCCTCTTCGGCAGTACCCTTGCCGTTGCAGGCGCCATTGAATCGAGAAAGGTTCACCA
GAAGCCCCTCGCGAGATCTGAACCTTTTTACCCGTCGCCATGGATGAATCCCAACGCCAT
CGGCTGGGCGGAGGCCTATGCCCAGGCCAAGTCCTTTGTCTCCCAAATGACTCTGCTAGA
GAAGGTCAACTTGACCACGGGAGTCGGCTGGGGGGAGGAGCAGTGCGTCGGCAACGTG
GGCGCGATCCCTCGCCTTGGACTTCGCAGTCTGTGCATGCATGACTCCCCTCTCGGCGTG
CGAGGAACCGACTACAACTCAGCGTTCCCCTCTGGCCAGACCGTTGCTGCTACCTGGGAT
CGCGGTCTGATGTACCGTCGCGGCTACGCAATGGGCCAGGAGGCCAAAGGCAAGGGCAT
CAATGTCCTTCTCGGACCAGTCGCCGGCCCCCTTGGCCGCATGCCCGAGGGCGGTCGTAA
CTGGGAAGGCTTCGCTCCGGATCCCGTCCTTACCGGCATCGGCATGTCCGAGACGATCAA
GGGCATTCAGGATGCTGGCGTCATCGCTTGTGCGAAGCACTTTATTGGAAACGAGCAGG
AGCACTTCAGACAGGTGCCAGAAGCCCAGGGATACGGTTACAACATCAGCGAAACCCTC
TCCTCCAACATTGACGACAAGACCATGCACGAGCTCTACCTTTGGCCGTTTGCCGATGCC
GTCCGGGCCGGCGTCGGCTCTGTCATGTGCTCGTACAACCAGGGCAACAACTCGTACGCC
TGCCAGAACTCGAAGCTGCTGAACGACCTCCTCAAGAACGAGCTTGGGTTTCAGGGCTTC
GTCATGAGCGACTGGTGGGCACAGCACACTGGCGCAGCAAGCGCCGTGGCTGGTCTCGA
TATGTCCATGCCGGGCGACACCATGGTCAACACTGGCGTCAGTTTCTGGGGCGCCAATCT
CACCCTCGCCGTCCTCAACGGCACAGTCCCTGCCTACCGTCTCGACGACATGTGCATGCG
CATCATGGCCGCCCTCTTCAAGGTCACCAAGACCACCGACCTGGAACCGATCAACTTCTC
CTTCTGGACCCGCGACACTTATGGCCCGATCCACTGGGCCGCCAAGCAGGGCTACCAGG
AGATTAATTCCCACGTTGACGTCCGCGCCGACCACGGCAACCTCATCCGGAACATTGCCG
CCAAGGGTACGGTGCTGCTGAAGAATACCGGCTCTCTACCCCTGAACAAGCCAAAGTTC
GTGGCCGTCATCGGCGAGGATGCTGGGCCGAGCCCCAACGGGCCCAACGGCTGCAGCGA
CCGCGGCTGTAACGAAGGCACGCTCGCCATGGGCTGGGGATCCGGCACAGCCAACTATC
CGTACCTCGTTTCCCCCGACGCCGCGCTCCAGGCGCGGGCCATCCAGGACGGCACGAGG
TACGAGAGCGTCCTGTCCAACTACGCCGAGGAAAATACAAAGGCTCTGGTCTCGCAGGC
CAATGCAACCGCCATCGTCTTCGTCAATGCCGACTCAGGCGAGGGCTACATCAACGTGG
ACGGTAACGAGGGCGACCGTAAGAACCTGACTCTCTGGAACAACGGTGATACTCTGGTC
AAGAACGTCTCGAGCTGGTGCAGCAACACCATCGTCGTCATCCACTCGGTCGGCCCGGTC
CTCCTGACCGATTGGTACGACAACCCCAACATCACGGCCATTCTCTGGGCTGGTCTTCCG
GGCCAGGAGTCGGGCAACTCCATCACCGACGTGCTTTACGGCAAGGTCAACCCCGCCGC
CCGCTCGCCCTTCACTTGGGGCAAGACCCGCGAAAGCTATGGCGCGGACGTCCTGTACA
AGCCGAATAATGGCAATTGGGCGCCCCAACAGGACTTCACCGAGGGCGTCTTCATCGAC
TACCGCTACTTCGACAAGGTTGACGATGACTCGGTCATCTACGAGTTCGGCCACGGCCTG
AGCTACACCACCTTCGAGTACAGCAACATCCGCGTCGTCAAGTCCAACGTCAGCGAGTA
CCGGCCCACGACGGGCACCACGATTCAGGCCCCGACGTTTGGCAACTTCTCCACCGACCT
CGAGGACTATCTCTTCCCCAAGGACGAGTTCCCCTACATCCCGCAGTACATCTACCCGTA
CCTCAACACGACCGACCCCCGGAGGGCCTCGGGCGATCCCCACTACGGCCAGACCGCCG
AGGAGTTCCTCCCGCCCCACGCCACCGATGACGACCCCCAGCCGCTCCTCCGGTCCTCGG
GCGGAAACTCCCCCGGCGGCAACCGCCAGCTGTACGACATTGTCTACACAATCACGGCC
GACATCACGAATACGGGCTCCGTTGTAGGCGAGGAGGTACCGCAGCTCTACGTCTCGCT
GGGCGGTCCCGAGGATCCCAAGGTGCAGCTGCGCGACTTTGACAGGATGCGGATCGAAC
CCGGCGAGACGAGGCAGTTCACCGGCCGCCTGACGCGCAGAGATCTGAGCAACTGGGAC
GTCACGGTGCAGGACTGGGTCATCAGCAGGTATCCCAAGACGGCATATGTTGGGAGGAG
CAGCCGGAAGTTGGATCTCAAGATTGAGCTTCCTTGATAAGTCGACCTCGACTTTGTTCC
CACTGTACTTTTAGCTCGTACAAAATACAATATACTTTTCATTTCTCCGTAAACAACATGT
TTTCCCATGTAATATCCTTTTCTATTTTTCGTTCCGTTACCAACTTTACACATACTTTATAT
AGCTATTCACTTCTATACACTAAAAAACTAAGACAATTTTAATTTTGCTGCCTGCCATATT
TCAATTTGTTATAAATTCCTATAATTTATCCTATTAGTAGCTAAAAAAAGATGAATGTGA
ATCGAATCCTAAGAGAATTGGATCTGATCCACAGGACGGGTGTGGTCGCCATGATCGCG
TAGTCGATAGTGGCTCCAAGTAGCGAAGCGAGCAGGACTGGGCGGCGGCCAAAGCGGTC
GGACAGTGCTCCGAGAACGGGTGCGCATAGAAATTGCATCAACGCATATAGCGCTAGCA
GCACGCCATAGTGACTGGCGATGCTGTCGGAATGGACGATATCCCGCAAGAGGCCCGGC
AGTACCGGCATAACCAAGCCTATGCCTACAGCATCCAGGGTGACGGTGCCGAGGATGAC
GATGAGCGCATTGTTAGATTTCATACACGGTGCCTGACTGCGTTAGCAATTTAACTGTGA
TAAACTACCGCATTAAAGCTTTTTCTTTCCAATTTTTTTTTTTTCGTCATTATAAAAATCAT
TACGACCGAGATTCCCGGGTAATAACTGATATAATTAAATTGAAGCTCTAATTTGTGAGT
TTAGTATACATGCATTTACTTATAATACAGTTTTTTAGTTTTGCTGGCCGCATCTTCTCAA
ATATGCTTCCCAGCCTGCTTTTCTGTAACGTTCACCCTCTACCTTAGCATCCCTTCCCTTTG
CAAATAGTCCTCTTCCAACAATAATAATGTCAGATCCTGTAGAGACCACATCATCCACGG
TTCTATACTGTTGACCCAATGCGTCTCCCTTGTCATCTAAACCCACACCGGGTGTCATAAT
CAACCAATCGTAACCTTCATCTCTTCCACCCATGTCTCTTTGAGCAATAAAGCCGATAAC
AAAATCTTTGTCGCTCTTCGCAATGTCAACAGTACCCTTAGTATATTCTCCAGTAGATAG
GGAGCCCTTGCATGACAATTCTGCTAACATCAAAAGGCCTCTAGGTTCCTTTGTTACTTCT
TCTGCCGCCTGCTTCAAACCGCTAACAATACCTGGGCCCACCACACCGTGTGCATTCGTA
ATGTCTGCCCATTCTGCTATTCTGTATACACCCGCAGAGTACTGCAATTTGACTGTATTAC
CAATGTCAGCAAATTTTCTGTCTTCGAAGAGTAAAAAATTGTACTTGGCGGATAATGCCT
TTAGCGGCTTAACTGTGCCCTCCATGGAAAAATCAGTCAAGATATCCACATGTGTTTTTA
GTAAACAAATTTTGGGACCTAATGCTTCAACTAACTCCAGTAATTCCTTGGTGGTACGAA
CATCCAATGAAGCACACAAGTTTGTTTGCTTTTCGTGCATGATATTAAATAGCTTGGCAG
CAACAGGACTAGGATGAGTAGCAGCACGTTCCTTATATGTAGCTTTCGACATGATTTATC
TTCGTTTCCTGCAGGTTTTTGTTCTGTGCAGTTGGGTTAAGAATACTGGGCAATTTCATGT
TTCTTCAACACTACATATGCGTATATATACCAATCTAAGTCTGTGCTCCTTCCTTCGTTCT
TCCTTCTGTTCGGAGATTACCGAATCAAAAAAATTTCAAGGAAACCGAAATCAAAAAAA
AGAATAAAAAAAAAATGATGAATTGAAAAGCTTATCGATCCTACCCCTTGCGCTAAAGA
AGTATATGTGCCTACTAACGCTTGTCTTTGTCTCTGTCACTAAACACTGGATTATTACTCC
CAGATACTTATTTTGGACTAATTTAAATGATTTCGGATCAACGTTCTTAATATCGCTGAAT
CTTCCACAATTGATGAAAGTAGCTAGGAAGAGGAATTGGTATAAAGTTTTTGTTTTTGTA
AATCTCGAAGTATACTCAAACGAATTTAGTATTTTCTCAGTGATCTCCCAGATGCTTTCAC
CCTCACTTAGAAGTGCTTTAAGCATTTTTTTACTGTGGCTATTTCCCTTATCTGCTTCTTCC
GATGATTCGAACTGTAATTGCAAACTACTTACAATATCAGTGATATCAGATTGATGTTTT
TGTCCATAGTAAGGAATAATTGTAAATTCCCAAGCAGGAATCAATTTCTTTAATGAGGCT
TCCAGAATTGTTGCTTTTTGCGTCTTGTATTTAAACTGGAGTGATTTATTGACAATATCGA
AACTCAGCGAATTGCTTATGATAGTATTATAGCTCATGAATGTGGCTCTCTTGATTGCTGT
TCCGTTATGTGTAATCATCCAACATAAATAGGTTAGTTCAGCAGCACATAATGCTATTTT
CTCACCTGAAGGTCTTTCAAACCTTTCCACAAACTGACGAACAAGCACCTTAGGTGGTGT
TTTACATAATATATCAAATTGTGGCATGCTTAGCGCCGATCTTGTGTGCAATTGATATCTA
GTTTCAACTACTCTATTTATCTTGTATCTTGCAGTATTCAAACACGCTAACTCGAAAAACT
AACTTTAATTGTCCTGTTTGTCTCGCGTTCTTTCGAAAAATGCACCGGCCGCGCATTATTT
GTACTGCGAAAATAATTGGTACTGCGGTATCTTCATTTCATATTTTAAAAATGCACCTTTG
CTGCTTTTCCTTAATTTTTAGACGGCCCGCAGGTTCGTTTTGCGGTACTATCTTGTGATAA
AAAGTTGTTTTGACATGTGATCTGCACAGATTTTATAATGTAATAAGCAAGAATACATTA
TCAAACGAACAATACTGGTAAAAGAAAACCAAAATGGACGACATTGAAACAGCCAAGA
ATCTGACGGTAAAAGCACGTACAGCTTATAGCGTCTGGGATGTATGTCGGCTGTTTATTG
AAATGATTGCTCCTGATGTAGATATTGATATAGAGAGTAAACGTAAGTCTGATGAGCTAC
TCTTTCCAGGATATGTCATAAGGCCCATGGAATCTCTCACAACCGGTAGGCCGTATGGTC
TTGATTCTAGCGCAGAAGATTCCAGCGTATCTTCTGACTCCAGTGCTGAGGTAATTTTGC
CTGCTGCGAAGATGGTTAAGGAAAGGTTTGATTCGATTGGAAATGGTATGCTCTCTTCAC
AAGAAGCAAGTCAGGCTGCCATAGATTTGATGCTACAGAATAACAAGCTGTTAGACAAT
AGAAAGCAACTATACAAATCTATTGCTATAATAATAGGAAGATTGCCCGAGAAAGACAA
GAAGAGAGCTACCGAAATGCTCATGAGAAAAATGGATTGTACACAGTTATTAGTCCCAC
CAGCTCCAACGGAAGAAGATGTTATGAAGCTCGTAAGCGTCGTTACCCAATTGCTTACTT
TAGTTCCACCAGATCGTCAAGCTGCTTTAATAGGTGATTTATTCATCCCGGAATCTCTAA
AGGATATATTCAATAGTTTCAATGAACTGGCGGCAGAGAATCGTTTACAGCAAAAAAAG
AGTGAGTTGGAAGGAAGGACTGAAGTGAACCATGCTAATACAAATGAAGAAGTTCCCTC
CAGGCGAACAAGAAGTAGAGACACAAATGCAAGAGGAGCATATAAATTACAAAACACC
ATCACTGAGGGCCCTAAAGCGGTTCCCACGAAAAAAAGGAGAGTAGCAACGAGGGTAA
GGGGCAGAAAATCACGTAATACTTCTAGGGTATGATCCAATATCAAAGGAAATGATAGC
ATTGAAGGATGAGACTAATCCAATTGAGGAGTGGCAGCATATAGAACAGCTAAAGGGTA
GTGCTGAAGGAAGCATACGATACCCCGCATGGAATGGGATAATATCACAGGAGGTACTA
GACTACCTTTCATCCTACATAAATAGACGCATATAAGTACGCATTTAAGCATAAACACGC
ACTATGCCGTTCTTCTCATGTATATATATATACAGGCAACACGCAGATATAGGTGCGACG
TGAACAGTGAGCTGTATGTGCGCAGCTCGCGTTGCATTTTCGGAAGCGCTCGTTTTCGGA
AACGCTTTGAAGTTCCTATTCCGAAGTTCCTATTCTCTAGAAAGTATAGGAACTTCAGAG
CGCTTTTGAAAACCAAAAGCGCTCTGAAGACGCACTTTCAAAAAACCAAAAACGCACCG
GACTGTAACGAGCTACTAAAATATTGCGAATACCGCTTCCACAAACATTGCTCAAAAGTA
TCTCTTTGCTATATATCTCTGTGCTATATCCCTATATAACCTACCCATCCACCTTTCGCTCC
TTGAACTTGCATCTAAACTCGACCTCTACATCAACAGGCTTCCAATGCTCTTCAAATTTTA
CTGTCAAGTAGACCCATACGGCTGTAATATGCTGCTCTTCATAATGTAAGCTTATCTTTAT
CGAATCGTGTGAAAAACTACTACCGCGATAAACCTTTACGGTTCCCTGAGATTGAATTAG
TTCCTTTAGTATATGATACAAGACACTTTTGAACTTTGTACGACGAATTTTGAGGTTCGCC
ATCCTCTGGCTATTTCCAATTATCCTGTCGGCTATTATCTCCGCCTCAGTTTGATCTTCCGC
TTCAGACTGCCATTTTTCACATAATGAATCTATTTCACCCCACAATCCTTCATCCGCCTCC
GCATCTTGTTCCGTTAAACTATTGACTTCATGTTGTACATTGTTTAGTTCACGAGAAGGGT
CCTCTTCAGGCGGTAGCTCCTGATCTCCTATATGACCTTTATCCTGTTCTCTTTCCACAAA
CTTAGAAATGTATTCATGAATTATGGAGCACCTAATAACATTCTTCAAGGCGGAGAAGTT
TGGGCCAGATGCCCAATATGCTTGACATGAAAACGTGAGAATGAATTTAGTATTATTGTG
ATATTCTGAGGCAATTTTATTATAATCTCGAAGATAAGAGAAGAATGCAGTGACCTTTGT
ATTGACAAATGGAGATTCCATGTATCTAAAAAATACGCCTTTAGGCCTTCTGATACCCTT
TCCCCTGCGGTTTAGCGTGCCTTTTACATTAATATCTAAACCCTCTCCGATGGTGGCCTTT
AACTGACTAATAAATGCAACCGATATAAACTGTGATAATTCTGGGTGATTTATGATTCGA
TCGACAATTGTATTGTACACTAGTGCAGGATCAGGCCAATCCAGTTCTTTTTCAATTACC
GGTGTGTCGTCTGTATTCAGTACATGTCCAACAAATGCAAATGCTAACGTTTTGTATTTCT
TATAATTGTCAGGAACTGGAAAAGTCCCCCTTGTCGTCTCGATTACACACCTACTTTCATC
GTACACCATAGGTTGGAAGTGCTGCATAATACATTGCTTAATACAAGCAAGCAGTCTCTC
GCCATTCATATTTCAGTTATTTTCCATTACAGCTGATGTCATTGTATATCAGCGCTGTAAA
AATCTATCTGTTACAGAAGGTTTTCGCGGTTTTTATAAACAAAACTTTCGTTACGAAATC
GAGCAATCACCCCAGCTGCGTATTTGGAAATTCGGGAAAAAGTAGAGCAACGCGAGTTG
CATTTTTTACACCATAATGCATGATTAACTTCGAGAAGGGATTAAGGCTAATTTCACTAG
TATGTTTCAAAAACCTCAATCTGTCCATTGAATGCCTTATAAAACAGCTATAGATTGCAT
AGAAGAGTTAGCTACTCAATGCTTTTTGTCAAAGCTTACTGATGATGATGTGTCTACTTTC
AGGCGGGTCTGTAGTAAGGAGAATGACATTATAAAGCTGGCACTTAGAATTCCACGGAC
TATAGACTATACTAGTATACTCCGTCTACTGTACGATACACTTCCGCTCAGGTCCTTGTCC
TTTAACGAGGCCTTACCACTCTTTTGTTACTCTATTGATCCAGCTCAGCAAAGGCAGTGTG
ATCTAAGATTCTATCTTCGCGATGTAGTAAAACTAGCTAGACCGAGAAAGAGACTAGAA
ATGCAAAAGGCACTTCTACAATGGCTGCCATCATTATTATCCGATGTGACGCTGCA
Polynucleotide sequence of Variant No. 73 yCDS:
(SEQ ID NO: 8)
TTGGATAACGGGTTAGCCCGTACACCTACTATGGGTTGGCTTCACTGGGAAAGATTCATG
TGTAACTTAGATTGCCAAGAAGAGCCTGACAGCTGTATCTCAGAGAAACTATTCATGGA
GATGGCTGAACTAATGGTAAGTGAAGGATGGAAGGATGCTGGTTATGAATACCTATGTA
TTGATGATTGCTGGATGGCTCCACAGCGTGATTCAGAAGGTAGGTTACAAGCTGACCCCC
AGAGATTCCCACATGGCATACGTCAGCTTGCAAACTACGTACACAGCAAGGGTCTAAAG
TTAGGCATCTACGCTGATGTCGGAAACAAGACATGTGCTGGTTTCCCAGGTTCATTCGGT
TACTATGACATAGATGCGCAGACGTTTGCTGATTGGGGTGTTGATTTGTTGAAGTTTGAT
GGATGCTACTGCGATTCCCTGGAGAACCTAGCCGATGGGTACAAACACATGAGTTTGGCT
CTAAACAGGACTGGTAGGAGCATCGTCTATAGTTGTGAATGGCCCTTGTACATGTGGCCG
TTTCAGAAGCCAAACTACACTGAGATAAGACAATACTGTAACCATTGGCGTAACTTTGCT
GACATAGATGATTCATGGGCTTCAATCAAATCTATCTTGGATTGGACTTCTTTCAACCAG
GAAAGAATTGTTGATGTTGCAGGTCCAGGTGGATGGAATGACCCTGATATGCTTGTCATA
GGGAACTTTGGGCTATCATGGAATCAACAAGTTACACAAATGGCTTTGTGGGCGATCATG
GCCGCACCCCTATTCATGTCTAATGATCTACGTCACATATCACCCCAAGCAAAGGCTTTA
CTTCAAGATAAGGATGTCATAGCGATCAACCAAGATCCTCTTGGTAAACAAGGTTATCAA
TTGAGACAAGGTGACAACTTTGAAGTGTGGGAAAGACCATTGTCTGGACTTGCGTGGGC
TGTTGCTATGATCAACCGTCAAGAGATCGGAGGGCCAAGATCTTACACTATCGCGGTAGC
CTCTTTGGGTAAGGGTGTTGCGTGCAATCCTGCCTGCTTCATTACACAATTGCTTCCAGTT
AAGAGAAAGTTGGGTTTCTATGAGTGGACATCTAGGCTAAGAAGTCACATCAATCCTACT
GGTACGGTATTGTTGCAATTGGAGAACACAATGCAAATGTCTTTGAAAGATTTGTTA
Polynucleotide sequence of Variant No. 73:
(SEQ ID NO: 9)
CTGGACAATGGATTGGCAAGGACGCCTACCATGGGCTGGCTGCACTGGGAGCGCTTCAT
GTGCAACCTTGACTGCCAGGAAGAGCCAGATTCCTGCATCAGTGAGAAGCTCTTCATGG
AGATGGCAGAGCTCATGGTCTCAGAAGGCTGGAAGGATGCAGGTTATGAGTACCTCTGC
ATTGATGACTGTTGGATGGCTCCCCAAAGAGATTCAGAAGGCAGACTTCAGGCAGACCC
TCAGCGCTTTCCTCATGGGATTCGCCAGCTAGCTAATTATGTTCACAGCAAAGGACTGAA
GCTAGGGATTTATGCAGATGTTGGAAATAAAACCTGCGCAGGCTTCCCTGGGAGTTTTGG
ATACTACGACATTGATGCCCAGACCTTTGCTGACTGGGGAGTAGATCTGCTAAAATTTGA
TGGTTGTTACTGTGACAGTTTGGAAAATTTGGCAGATGGTTATAAGCACATGTCCTTGGC
CCTGAATAGGACTGGCAGAAGCATTGTGTACTCCTGTGAGTGGCCTCTTTATATGTGGCC
CTTTCAAAAGCCCAATTATACAGAAATCCGACAGTACTGCAATCACTGGCGAAATTTTGC
TGACATTGATGATTCCTGGGCGAGTATAAAGAGTATCTTGGACTGGACATCTTTTAACCA
GGAGAGAATTGTTGATGTTGCTGGACCAGGGGGTTGGAATGACCCAGATATGTTAGTGA
TTGGCAACTTTGGCCTCAGCTGGAATCAGCAAGTAACTCAGATGGCCCTCTGGGCTATCA
TGGCTGCTCCTTTATTCATGTCTAATGACCTCCGACACATCAGCCCTCAAGCCAAAGCTCT
CCTTCAGGATAAGGACGTAATTGCCATCAATCAGGACCCCTTGGGCAAGCAAGGGTACC
AGCTTAGACAGGGAGACAACTTTGAAGTGTGGGAACGACCTCTCTCAGGCTTAGCCTGG
GCTGTAGCTATGATAAACCGGCAGGAGATTGGTGGACCTCGCTCTTATACCATCGCAGTT
GCTTCCCTGGGTAAAGGAGTGGCCTGTAATCCTGCCTGCTTCATCACACAGCTCCTCCCT
GTGAAAAGGAAGCTAGGGTTCTATGAATGGACTTCAAGGTTAAGAAGTCACATAAATCC
CACAGGCACTGTTTTGCTTCAGCTAGAAAATACAATGCAGATGTCATTAAAAGACTTACT
T
Polypeptide sequence of Variant No. 73:
(SEQ ID NO: 10)
LDNGLARTPTMGWLHWERFMCNLDCQEEPDSCISEKLFMEMAELMVSEGWKDAGYEYLCI
DDCWMAPQRDSEGRLQADPQRFPHGIRQLANYVHSKGLKLGIYADVGNKTCAGFPGSFGYY
DIDAQTFADWGVDLLKFDGCYCDSLENLADGYKHMSLALNRTGRSIVYSCEWPLYMWPFQ
KPNYTEIRQYCNHWRNFADIDDSWASIKSILDWTSFNQERIVDVAGPGGWNDPDMLVIGNFG
LSWNQQVTQMALWAIMAAPLFMSNDLRHISPQAKALLQDKDVIAINQDPLGKQGYQLRQG
DNFEVWERPLSGLAWAVAMINRQEIGGPRSYTIAVASLGKGVACNPACFITQLLPVKRKLGF
YEWTSRLRSHINPTGTVLLQLENTMQMSLKDLL
Polynucleotide sequence of Variant No. 218 yCDS:
(SEQ ID NO: 11)
TTGGATAACGGGTTAGCCCGTACACCTACTATGGGTTGGCTTCACTGGGAAAGATTCATG
TGTAACTTAGATTGCCAAGAAGAGCCTGACAGCTGTATCTCAGAGAAACTATTCATGGA
GATGGCTGAACTAATGGTAAGTGAAGGATGGAAGGATGCTGGTTATGAATACCTATGTA
TTGATGATTGCTGGATGGCTCCACAGCGTGATTCAGAAGGTAGGTTACAAGCTGACCCCC
AGAGATTCCCACATGGCATACGTCAGCTTGCAAACTACGTACACAGCAAGGGTCTAAAG
TTAGGCATCTACGCTGATGTCGGAAACAAGACATGTGCTGGTTTCCCAGGTTCATTCGGT
TACTATGACATAGATGCGCAGACGTTTGCTGATTGGGGTGTTGATTTGTTGAAGTTTGAT
GGATGCTACTGCGATTCCCTGGAGAACCTAGCCGATGGGTACAAACACATGAGTTTGGCT
CTAAACAGGACTGGTAGGAGCATCGTCTATAGTTGTGAATGGCCCTTGTACATGTGGCCG
TTTCAGAAGCCAAACTACACTGAGATAAGACAATACTGTAACCATTGGCGTAACTTTGCT
GACATAGATGATTCATGGGCTTCAATCAAATCTATCTTGGATTGGACTTCTTTCAACCAG
GAAAGAATTGTTGATGTTGCAGGTCCAGGTGGATGGAATGACCCTGATATGCTTGTCATA
GGGAACTTTGGGCTATCATGGAATCAACAAGTTACACAAATGGCTTTGTGGGCGATCATG
GCCGCACCCCTATTCATGTCTAATGATCTACGTCACATATCACCCCAAGCAAAGGCTTTA
CTTCAAGATAAGGATGTCATAGCGATCAACCAAGATCCTCTTGGTAAACAAGGTTATCAA
TTGAGACAAGGTGACAACTTTGAAGTGTGGGAAAGACCATTGTCTGGACTTGCGTGGGC
TGTTGCTATTATCAACCGTCAAGAGATCGGAGGGCCAAGATCTTACACTATCGCGGTAGC
CTCTTTGGGTAAGGGTGTTGCGTGCAATCCTGCCTGCTTCATTACACAATTGCTTCCAGTT
AAGAGAAAGTTGGGTTTCTATAACTGGACATCTAGGCTAAAAAGTCACATTAATCCTACT
GGTACGGTATTGTTGCAATTGGAGAACACAATGCAAATGTCTTTGAAAGATTTGTTA
Polynucleotide sequence of Variant No. 218 hCDS:
(SEQ ID NO: 12)
CTGGACAATGGATTGGCAAGGACGCCTACCATGGGCTGGCTGCACTGGGAGCGCTTCAT
GTGCAACCTTGACTGCCAGGAAGAGCCAGATTCCTGCATCAGTGAGAAGCTCTTCATGG
AGATGGCAGAGCTCATGGTCTCAGAAGGCTGGAAGGATGCAGGTTATGAGTACCTCTGC
ATTGATGACTGTTGGATGGCTCCCCAAAGAGATTCAGAAGGCAGACTTCAGGCAGACCC
TCAGCGCTTTCCTCATGGGATTCGCCAGCTAGCTAATTATGTTCACAGCAAAGGACTGAA
GCTAGGGATTTATGCAGATGTTGGAAATAAAACCTGCGCAGGCTTCCCTGGGAGTTTTGG
ATACTACGACATTGATGCCCAGACCTTTGCTGACTGGGGAGTAGATCTGCTAAAATTTGA
TGGTTGTTACTGTGACAGTTTGGAAAATTTGGCAGATGGTTATAAGCACATGTCCTTGGC
CCTGAATAGGACTGGCAGAAGCATTGTGTACTCCTGTGAGTGGCCTCTTTATATGTGGCC
CTTTCAAAAGCCCAATTATACAGAAATCCGACAGTACTGCAATCACTGGCGAAATTTTGC
TGACATTGATGATTCCTGGGCGAGTATAAAGAGTATCTTGGACTGGACATCTTTTAACCA
GGAGAGAATTGTTGATGTTGCTGGACCAGGGGGTTGGAATGACCCAGATATGTTAGTGA
TTGGCAACTTTGGCCTCAGCTGGAATCAGCAAGTAACTCAGATGGCCCTCTGGGCTATCA
TGGCTGCTCCTTTATTCATGTCTAATGACCTCCGACACATCAGCCCTCAAGCCAAAGCTCT
CCTTCAGGATAAGGACGTAATTGCCATCAATCAGGACCCCTTGGGCAAGCAAGGGTACC
AGCTTAGACAGGGAGACAACTTTGAAGTGTGGGAACGACCTCTCTCAGGCTTAGCCTGG
GCTGTAGCTATTATAAACCGGCAGGAGATTGGTGGACCTCGCTCTTATACCATCGCAGTT
GCTTCCCTGGGTAAAGGAGTGGCCTGTAATCCTGCCTGCTTCATCACACAGCTCCTCCCT
GTGAAAAGGAAGCTAGGGTTCTATAACTGGACTTCAAGGTTAAAAAGTCACATAAATCC
CACAGGCACTGTTTTGCTTCAGCTAGAAAATACAATGCAGATGTCATTAAAAGACTTACT
T
Polypeptide sequence of Variant No. 218:
(SEQ ID NO: 13)
LDNGLARTPTMGWLHWERFMCNLDCQEEPDSCISEKLFMEMAELMVSEGWKDAGYEYLCI
DDCWMAPQRDSEGRLQADPQRFPHGIRQLANYVHSKGLKLGIYADVGNKTCAGFPGSFGYY
DIDAQTFADWGVDLLKFDGCYCDSLENLADGYKHMSLALNRTGRSIVYSCEWPLYMWPFQ
KPNYTEIRQYCNHWRNFADIDDSWASIKSILDWTSFNQERIVDVAGPGGWNDPDMLVIGNFG
LSWNQQVTQMALWAIMAAPLFMSNDLRHISPQAKALLQDKDVIAINQDPLGKQGYQLRQG
DNFEVWERPLSGLAWAVAIINRQEIGGPRSYTIAVASLGKGVACNPACFITQLLPVKRKLGFY
NVVTSRLKSHINPTGTVLLQLENTMQMSLKDLL
Polynucleotide sequence of Variant No. 326 yCDS:
(SEQ ID NO: 14)
TTGGATAACGGGTTAGCCCGTACACCTACTATGGGTTGGCTTCACTGGGAAAGATTCATG
TGTAACTTAGATTGCCAAGAAGAGCCTGACAGCTGTATCTCAGAGAAACTATTCATGGA
GATGGCTGAACGGATGGTAAGTGAAGGATGGAAGGATGCTGGTTATGAATACCTATGTA
TTGATGATTGCTGGATGGCTCCACAGCGTGATTCAGAAGGTAGGTTACAAGCTGACCCCC
AGAGATTCCCACATGGCATACGTCAGCTTGCAAACTACGTACACAGCAAAGGTCTAAAG
TTAGGCATCTACGCTGATGTCGGAAACAAGACATGTGCTGGTTTCCCAGGTTCATTCGGT
TACTATGACATAGATGCGCAGACGTTTGCTGATTGGGGTGTTGATTTGTTGAAGTTTGAT
GGATGCTACTGCGATTCCCTGGAGAACCTAGCCGATGGGTACAAACACATGAGTTTGGCT
CTAAACAGGACTGGTAGGAGCATCGTCTATAGTTGTGAATGGCCCTTGTACATGTGGCCG
TTTCAGAAGCCAAACTACACTGAGATAAGACAATACTGTAACCATTGGCGTAACTTTGCT
GACATAGATGATTCATGGGCTTCAATCAAATCTATCTTGGATTGGACTTCTCGTAACCAG
GAAAGAATTGTTGATGTTGCAGGTCCAGGTGGATGGAATGACCCTGATATGCTTGTCATA
GGGAACTTTGGGCTATCATGGGACCAACAAGTTACACAAATGGCTTTGTGGGCGATCAT
GGCCGCACCCCTATTCATGTCTAATGATCTACGTCACATATCACCCCAAGCAAAGGCTTT
ACTTCAAGATAAGGATGTCATAGCGATCAACCAAGATCCTCTTGGTAAACAAGGTTATCA
ATTGAGAAAAGGTGACAACTTTGAAGTGTGGGAAAGACCATTGTCTGGAGATGCGTGGG
CTGTTGCTATTATCAACCGTCAAGAGATCGGAGGGCCAAGATCTTACACTATCCCGGTAG
CCTCTTTGGGTAAGGGTGTTGCGTGCAATCCTGCCTGCTTCATTACACAATTGCTTCCAGT
TAAGAGACAATTGGGTTTCTATAACTGGACCTCTAGGCTAAAAAGTCACATTAATCCTAC
TGGTACGGTATTGTTGCAATTGGAGAACACAATGCAAATGTCTTTGAAAGATTTGTTA
Polypeptide sequence of Variant No. 326:
(SEQ ID NO: 15)
LDNGLARTPTMGWLHWERFMCNLDCQEEPDSCISEKLFMEMAERMVSEGWKDAGYEYLCI
DDCWMAPQRDSEGRLQADPQRFPHGIRQLANYVHSKGLKLGIYADVGNKTCAGFPGSFGYY
DIDAQTFADWGVDLLKFDGCYCDSLENLADGYKHMSLALNRTGRSIVYSCEWPLYMWPFQ
KPNYTEIRQYCNHWRNFADIDDSWASIKSILDWTSRNQERIVDVAGPGGWNDPDMLVIGNF
GLSWDQQVTQMALWAIMAAPLFMSNDLRHISPQAKALLQDKDVIAINQDPLGKQGYQLRK
GDNFEVWERPLSGDAWAVAIINRQEIGGPRSYTIPVASLGKGVACNPACFITQLLPVKRQLGF
YNVVTSRLKSHINPTGTVLLQLENTMQMSLKDLL
Polynucleotide sequence of Variant No. 206 yCDS:
(SEQ ID NO: 16)
TTGGATAACGGGTTAGCCCGTACACCTACTATGGGTTGGCTTCACTGGGAAAGATTCATG
TGTAACTTAGATTGCCAAGAAGAGCCTGACAGCTGTATCTCAGAGAAACTATTCATGGA
GATGGCTGAACTAATGGTAAGTGAAGGATGGAAGGATGCTGGTTATGAATACCTATGTA
TTGATGATTGCTGGATGGCTCCACAGCGTGATTCAGAAGGTAGGTTACAAGCTGACCCCC
AGAGATTCCCACATGGCATACGTCAGCTTGCAAACTACGTACACAGCAAGGGTCTAAAG
TTAGGCATCTACGCTGATGTCGGAAACAAGACATGTGCTGGTTTCCCAGGTTCATTCGGT
TACTATGACATAGATGCGCAGACGTTTGCTGATTGGGGTGTTGATTTGTTGAAGTTTGAT
GGATGCTACTGCGATTCCCTGGAGAACCTAGCCGATGGGTACAAACACATGAGTTTGGCT
CTAAACAGGACTGGTAGGAGCATCGTCTATAGTTGTGAATGGCCCTTGTACATGTGGCCG
TTTCAGAAGCCAAACTACACTGAGATAAGACAATACTGTAACCATTGGCGTAACTTTGCT
GACATAGATGATTCATGGGCTTCAATCAAATCTATCTTGGATTGGACTTCTTTCAACCAG
GAAAGAATTGTTGATGTTGCAGGTCCAGGTGGATGGAATGACCCTGATATGCTTGTCATA
GGGAACTTTGGGCTATCATGGAATCAACAAGTTACACAAATGGCTTTGTGGGCGATCATG
GCCGCACCCCTATTCATGTCTAATGATCTACGTCACATATCACCCCAAGCAAAGGCTTTA
CTTCAAGATAAGGATGTCATAGCGATCAACCAAGATCCTCTTGGTAAACAAGGTTATCAA
TTGAGACAAGGTGACAACTTTGAAGTGTGGGAAAGACCATTGTCTGGACTTGCGTGGGC
TGTTGCTATGATCAACCGTCAAGAGATCGGAGGGCCAAGATCTTACACTATCGCGGTAGC
CTCTTTGGGTAAGGGTGTTGCGTGCAATCCTGCCTGCTTCATTACACAATTGCTTCCAGTT
AAGAGAAAGTTGGGTTTCTATAATTGGACCTCTAGGCTAAGAAGTCACATCAATCCTACT
GGTACGGTATTGTTGCAATTGGAGAACACAATGCAAATGTCTTTGAAAGATTTGTTA
Polynucleotide sequence of Variant No. 206 hCDS:
(SEQ ID NO: 17)
CTGGACAATGGATTGGCAAGGACGCCTACCATGGGCTGGCTGCACTGGGAGCGCTTCAT
GTGCAACCTTGACTGCCAGGAAGAGCCAGATTCCTGCATCAGTGAGAAGCTCTTCATGG
AGATGGCAGAGCTCATGGTCTCAGAAGGCTGGAAGGATGCAGGTTATGAGTACCTCTGC
ATTGATGACTGTTGGATGGCTCCCCAAAGAGATTCAGAAGGCAGACTTCAGGCAGACCC
TCAGCGCTTTCCTCATGGGATTCGCCAGCTAGCTAATTATGTTCACAGCAAAGGACTGAA
GCTAGGGATTTATGCAGATGTTGGAAATAAAACCTGCGCAGGCTTCCCTGGGAGTTTTGG
ATACTACGACATTGATGCCCAGACCTTTGCTGACTGGGGAGTAGATCTGCTAAAATTTGA
TGGTTGTTACTGTGACAGTTTGGAAAATTTGGCAGATGGTTATAAGCACATGTCCTTGGC
CCTGAATAGGACTGGCAGAAGCATTGTGTACTCCTGTGAGTGGCCTCTTTATATGTGGCC
CTTTCAAAAGCCCAATTATACAGAAATCCGACAGTACTGCAATCACTGGCGAAATTTTGC
TGACATTGATGATTCCTGGGCGAGTATAAAGAGTATCTTGGACTGGACATCTTTTAACCA
GGAGAGAATTGTTGATGTTGCTGGACCAGGGGGTTGGAATGACCCAGATATGTTAGTGA
TTGGCAACTTTGGCCTCAGCTGGAATCAGCAAGTAACTCAGATGGCCCTCTGGGCTATCA
TGGCTGCTCCTTTATTCATGTCTAATGACCTCCGACACATCAGCCCTCAAGCCAAAGCTCT
CCTTCAGGATAAGGACGTAATTGCCATCAATCAGGACCCCTTGGGCAAGCAAGGGTACC
AGCTTAGACAGGGAGACAACTTTGAAGTGTGGGAACGACCTCTCTCAGGCTTAGCCTGG
GCTGTAGCTATGATAAACCGGCAGGAGATTGGTGGACCTCGCTCTTATACCATCGCAGTT
GCTTCCCTGGGTAAAGGAGTGGCCTGTAATCCTGCCTGCTTCATCACACAGCTCCTCCCT
GTGAAAAGGAAGCTAGGGTTCTATAACTGGACTTCAAGGTTAAGAAGTCACATAAATCC
CACAGGCACTGTTTTGCTTCAGCTAGAAAATACAATGCAGATGTCATTAAAAGACTTACT
T
Polypeptide sequence of Variant No. 206:
(SEQ ID NO: 18)
LDNGLARTPTMGWLHWERFMCNLDCQEEPDSCISEKLFMEMAELMVSEGWKDAGYEYLCI
DDCWMAPQRDSEGRLQADPQRFPHGIRQLANYVHSKGLKLGIYADVGNKTCAGFPGSFGYY
DIDAQTFADWGVDLLKFDGCYCDSLENLADGYKHMSLALNRTGRSIVYSCEWPLYMWPFQ
KPNYTEIRQYCNHWRNFADIDDSWASIKSILDWTSFNQERIVDVAGPGGWNDPDMLVIGNFG
LSWNQQVTQMALWAIMAAPLFMSNDLRHISPQAKALLQDKDVIAINQDPLGKQGYQLRQG
DNFEVWERPLSGLAWAVAMINRQEIGGPRSYTIAVASLGKGVACNPACFITQLLPVKRKLGF
YNWTSRLRSHINPTGTVLLQLENTMQMSLKDLL
Polynucleotide sequence of Variant No. 205 yCDS:
(SEQ ID NO: 19)
TTGGATAACGGGTTAGCCCGTACACCTACTATGGGTTGGCTTCACTGGGAAAGATTCATG
TGTAACTTAGATTGCCAAGAAGAGCCTGACAGCTGTATCTCAGAGAAACTATTCATGGA
GATGGCTGAACTAATGGTAAGTGAAGGATGGAAGGATGCTGGTTATGAATACCTATGTA
TTGATGATTGCTGGATGGCTCCACAGCGTGATTCAGAAGGTAGGTTACAAGCTGACCCCC
AGAGATTCCCACATGGCATACGTCAGCTTGCAAACTACGTACACAGCAAGGGTCTAAAG
TTAGGCATCTACGCTGATGTCGGAAACAAGACATGTGCTGGTTTCCCAGGTTCATTCGGT
TACTATGACATAGATGCGCAGACGTTTGCTGATTGGGGTGTTGATTTGTTGAAGTTTGAT
GGATGCTACTGCGATTCCCTGGAGAACCTAGCCGATGGGTACAAACACATGAGTTTGGCT
CTAAACAGGACTGGTAGGAGCATCGTCTATAGTTGTGAATGGCCCTTGTACATGTGGCCG
TTTCAGAAGCCAAACTACACTGAGATAAGACAATACTGTAACCATTGGCGTAACTTTGCT
GACATAGATGATTCATGGGCTTCAATCAAATCTATCTTGGATTGGACTTCTTTCAACCAG
GAAAGAATTGTTGATGTTGCAGGTCCAGGTGGATGGAATGACCCTGATATGCTTGTCATA
GGGAACTTTGGGCTATCATGGAATCAACAAGTTACACAAATGGCTTTGTGGGCGATCATG
GCCGCACCCCTATTCATGTCTAATGATCTACGTCACATATCACCCCAAGCAAAGGCTTTA
CTTCAAGATAAGGATGTCATAGCGATCAACCAAGATCCTCTTGGTAAACAAGGTTATCAA
TTGAGACAAGGTGACAACTTTGAAGTGTGGGAAAGACCATTGTCTGGACTTGCGTGGGC
TGTTGCTATGATCAACCGTCAAGAGATCGGAGGGCCAAGATCTTACACTATCGCGGTAGC
CTCTTTGGGTAAGGGTGTTGCGTGCAATCCTGCCTGCTTCATTACACAATTGCTTCCAGTT
AAGAGAAAGTTGGGTTTCTATGATTGGGACTCTAGGCTAAGAAGTCACATCAATCCTACT
GGTACGGTATTGTTGCAATTGGAGAACACAATGCAAATGTCTTTGAAAGATTTGTTA
Polynucleotide sequence of Variant No. 205 hCDS:
(SEQ ID NO: 20)
CTGGACAATGGATTGGCAAGGACGCCTACCATGGGCTGGCTGCACTGGGAGCGCTTCAT
GTGCAACCTTGACTGCCAGGAAGAGCCAGATTCCTGCATCAGTGAGAAGCTCTTCATGG
AGATGGCAGAGCTCATGGTCTCAGAAGGCTGGAAGGATGCAGGTTATGAGTACCTCTGC
ATTGATGACTGTTGGATGGCTCCCCAAAGAGATTCAGAAGGCAGACTTCAGGCAGACCC
TCAGCGCTTTCCTCATGGGATTCGCCAGCTAGCTAATTATGTTCACAGCAAAGGACTGAA
GCTAGGGATTTATGCAGATGTTGGAAATAAAACCTGCGCAGGCTTCCCTGGGAGTTTTGG
ATACTACGACATTGATGCCCAGACCTTTGCTGACTGGGGAGTAGATCTGCTAAAATTTGA
TGGTTGTTACTGTGACAGTTTGGAAAATTTGGCAGATGGTTATAAGCACATGTCCTTGGC
CCTGAATAGGACTGGCAGAAGCATTGTGTACTCCTGTGAGTGGCCTCTTTATATGTGGCC
CTTTCAAAAGCCCAATTATACAGAAATCCGACAGTACTGCAATCACTGGCGAAATTTTGC
TGACATTGATGATTCCTGGGCGAGTATAAAGAGTATCTTGGACTGGACATCTTTTAACCA
GGAGAGAATTGTTGATGTTGCTGGACCAGGGGGTTGGAATGACCCAGATATGTTAGTGA
TTGGCAACTTTGGCCTCAGCTGGAATCAGCAAGTAACTCAGATGGCCCTCTGGGCTATCA
TGGCTGCTCCTTTATTCATGTCTAATGACCTCCGACACATCAGCCCTCAAGCCAAAGCTCT
CCTTCAGGATAAGGACGTAATTGCCATCAATCAGGACCCCTTGGGCAAGCAAGGGTACC
AGCTTAGACAGGGAGACAACTTTGAAGTGTGGGAACGACCTCTCTCAGGCTTAGCCTGG
GCTGTAGCTATGATAAACCGGCAGGAGATTGGTGGACCTCGCTCTTATACCATCGCAGTT
GCTTCCCTGGGTAAAGGAGTGGCCTGTAATCCTGCCTGCTTCATCACACAGCTCCTCCCT
GTGAAAAGGAAGCTAGGGTTCTATGATTGGGATTCAAGGTTAAGAAGTCACATAAATCC
CACAGGCACTGTTTTGCTTCAGCTAGAAAATACAATGCAGATGTCATTAAAAGACTTACT
T
Polypeptide sequence of Variant No. 205:
(SEQ ID NO: 21)
LDNGLARTPTMGWLHWERFMCNLDCQEEPDSCISEKLFMEMAELMVSEGWKDAGYEYLCI
DDCWMAPQRDSEGRLQADPQRFPHGIRQLANYVHSKGLKLGIYADVGNKTCAGFPGSFGYY
DIDAQTFADWGVDLLKFDGCYCDSLENLADGYKHMSLALNRTGRSIVYSCEWPLYMWPFQ
KPNYTEIRQYCNHWRNFADIDDSWASIKSILDWTSFNQERIVDVAGPGGWNDPDMLVIGNFG
LSWNQQVTQMALWAIMAAPLFMSNDLRHISPQAKALLQDKDVIAINQDPLGKQGYQLRQG
DNFEVWERPLSGLAWAVAMINRQEIGGPRSYTIAVASLGKGVACNPACFITQLLPVKRKLGF
YDWDSRLRSHINPTGTVLLQLENTMQMSLKDLL
Polynucleotide sequence of Variant No. 76 yCDS:
(SEQ ID NO: 22)
TTGGATAACGGGTTAGCCCGTACACCTACTATGGGTTGGCTTCACTGGGAAAGATTCATG
TGTAACTTAGATTGCCAAGAAGAGCCTGACAGCTGTATCTCAGAGAAACTATTCATGGA
GATGGCTGAACTAATGGTAAGTGAAGGATGGAAGGATGCTGGTTATGAATACCTATGTA
TTGATGATTGCTGGATGGCTCCACAGCGTGATTCAGAAGGTAGGTTACAAGCTGACCCCC
AGAGATTCCCACATGGCATACGTCAGCTTGCAAACTACGTACACAGCAAGGGTCTAAAG
TTAGGCATCTACGCTGATGTCGGAAACAAGACATGTGCTGGTTTCCCAGGTTCATTCGGT
TACTATGACATAGATGCGCAGACGTTTGCTGATTGGGGTGTTGATTTGTTGAAGTTTGAT
GGATGCTACTGCGATTCCCTGGAGAACCTAGCCGATGGGTACAAACACATGAGTTTGGCT
CTAAACAGGACTGGTAGGAGCATCGTCTATAGTTGTGAATGGCCCTTGTACATGTGGCCG
TTTCAGAAGCCAAACTACACTGAGATAAGACAATACTGTAACCATTGGCGTAACTTTGCT
GACATAGATGATTCATGGAGGTCAATCAAATCTATCTTGGATTGGACTTCTTTCAACCAG
GAAAGAATTGTTGATGTTGCAGGTCCAGGTGGATGGAATGACCCTGATATGCTTGTCATA
GGGAACTTTGGGCTATCATGGAATCAACAAGTTACACAAATGGCTTTGTGGGCGATCATG
GCCGCACCCCTATTCATGTCTAATGATCTACGTCACATATCACCCCAAGCAAAGGCTTTA
CTTCAAGATAAGGATGTCATAGCGATCAACCAAGATCCTCTTGGTAAACAAGGTTATCAA
TTGAGACAAGGTGACAACTTTGAAGTGTGGGAAAGACCATTGTCTGGACTTGCGTGGGC
TGTTGCTATGATCAACCGTCAAGAGATCGGAGGGCCAAGATCTTACACTATCGCGGTAGC
CTCTTTGGGTAAGGGTGTTGCGTGCAATCCTGCCTGCTTCATTACACAATTGCTTCCAGTT
AAGAGAAAGTTGGGTTTCTATGAGTGGACATCTAGGCTAAGAAGTCACATCAATCCTACT
GGTACGGTATTGTTGCAATTGGAGAACACAATGCAAATGTCTTTGAAAGATTTGTTA
Polynucleotide sequence of Variant No. 76 hCDS:
(SEQ ID NO: 23)
CTGGACAATGGATTGGCAAGGACGCCTACCATGGGCTGGCTGCACTGGGAGCGCTTCAT
GTGCAACCTTGACTGCCAGGAAGAGCCAGATTCCTGCATCAGTGAGAAGCTCTTCATGG
AGATGGCAGAGCTCATGGTCTCAGAAGGCTGGAAGGATGCAGGTTATGAGTACCTCTGC
ATTGATGACTGTTGGATGGCTCCCCAAAGAGATTCAGAAGGCAGACTTCAGGCAGACCC
TCAGCGCTTTCCTCATGGGATTCGCCAGCTAGCTAATTATGTTCACAGCAAAGGACTGAA
GCTAGGGATTTATGCAGATGTTGGAAATAAAACCTGCGCAGGCTTCCCTGGGAGTTTTGG
ATACTACGACATTGATGCCCAGACCTTTGCTGACTGGGGAGTAGATCTGCTAAAATTTGA
TGGTTGTTACTGTGACAGTTTGGAAAATTTGGCAGATGGTTATAAGCACATGTCCTTGGC
CCTGAATAGGACTGGCAGAAGCATTGTGTACTCCTGTGAGTGGCCTCTTTATATGTGGCC
CTTTCAAAAGCCCAATTATACAGAAATCCGACAGTACTGCAATCACTGGCGAAATTTTGC
TGACATTGATGATTCCTGGCGTAGTATAAAGAGTATCTTGGACTGGACATCTTTTAACCA
GGAGAGAATTGTTGATGTTGCTGGACCAGGGGGTTGGAATGACCCAGATATGTTAGTGA
TTGGCAACTTTGGCCTCAGCTGGAATCAGCAAGTAACTCAGATGGCCCTCTGGGCTATCA
TGGCTGCTCCTTTATTCATGTCTAATGACCTCCGACACATCAGCCCTCAAGCCAAAGCTCT
CCTTCAGGATAAGGACGTAATTGCCATCAATCAGGACCCCTTGGGCAAGCAAGGGTACC
AGCTTAGACAGGGAGACAACTTTGAAGTGTGGGAACGACCTCTCTCAGGCTTAGCCTGG
GCTGTAGCTATGATAAACCGGCAGGAGATTGGTGGACCTCGCTCTTATACCATCGCAGTT
GCTTCCCTGGGTAAAGGAGTGGCCTGTAATCCTGCCTGCTTCATCACACAGCTCCTCCCT
GTGAAAAGGAAGCTAGGGTTCTATGAATGGACTTCAAGGTTAAGAAGTCACATAAATCC
CACAGGCACTGTTTTGCTTCAGCTAGAAAATACAATGCAGATGTCATTAAAAGACTTACT
T
Polypeptide sequence of Variant No. 76:
(SEQ ID NO: 24)
LDNGLARTPTMGWLHWERFMCNLDCQEEPDSCISEKLFMEMAELMVSEGWKDAGYEYLCI
DDCWMAPQRDSEGRLQADPQRFPHGIRQLANYVHSKGLKLGIYADVGNKTCAGFPGSFGYY
DIDAQTFADWGVDLLKFDGCYCDSLENLADGYKHMSLALNRTGRSIVYSCEWPLYMWPFQ
KPNYTEIRQYCNHWRNFADIDDSWRSIKSILDWTSFNQERIVDVAGPGGWNDPDMLVIGNFG
LSWNQQVTQMALWAIMAAPLFMSNDLRHISPQAKALLQDKDVIAINQDPLGKQGYQLRQG
DNFEVWERPLSGLAWAVAMINRQEIGGPRSYTIAVASLGKGVACNPACFITQLLPVKRKLGF
YEWTSRLRSHINPTGTVLLQLENTMQMSLKDLL
Polynucleotide sequence of Mfalpha signal peptide:
(SEQ ID NO: 25)
ATGAGATTTCCTTCAATTTTTACTGCAGTTTTATTCGCAGCATCCTCCGCATTAGCT
Polypeptide sequence of Mfalpha signal peptide:
(SEQ ID NO: 26)
MRFPSIFTAVLFAASSALA
Polynucleotide sequence of MM0435:
(SEQ ID NO: 27)
ttaactatatcgtaatacacaggatccaccATGAGATTTCCTTCAATTTTTACTG
Polynucleotide sequence of MM0439:
(SEQ ID NO: 28)
AGTAGGTGTACGGGCTAACCCGTTATCCAAAGCTAATGCGGAGGATGC
Polynucleotide sequence of MM0514:
(SEQ ID NO: 29)
TTTTACTGCAGTTTTATTCGCAGCATCCTCCGCATTAGCTTTGGATAACGGGTTAGCCCG
Polynucleotide sequence of MM0481:
(SEQ ID NO: 30)
GAGCTAAAAGTACAGTGGGAACAAAGTCGAGGTCGACTTATAACAAATCTTTCAAAGAC
A
Polynucleotide sequence of Synthetic mammalian signal peptide:
(SEQ ID NO: 31)
ATGGAATGGAGCTGGGTCTTTCTCTTCTTCCTGTCAGTAACGACTGGTGTCCACTCC
Polynucleotide sequence of LAKE Fw:
(SEQ ID NO: 32)
CGATCGAAGCTTCGCCACCA
Polynucleotide sequence of Br reverse:
(SEQ ID NO: 33)
CTTGCCAATCCATTGTCCAGGGAGTGGACACCAGTCGTTA
Polynucleotide sequence of Br Fw:
(SEQ ID NO: 34)
TAACGACTGGTGTCCACTCCCTGGACAATGGATTGGCAAG
Polynucleotide sequence of hGLA Rv:
(SEQ ID NO: 35)
CGATCGGCGGCCGCTCAAAGTAAGTCTTTTAATGACA
Polynucleotide sequence of SP-GLA (yCDS):
(SEQ ID NO: 36)
ATGAGATTTCCTTCAATTTTTACTGCAGTTTTATTCGCAGCATCCTCCGCATTAGCTTTGG
ATAACGGGTTAGCCCGTACACCTACTATGGGTTGGCTTCACTGGGAAAGATTCATGTGTA
ACTTAGATTGCCAAGAAGAGCCTGACAGCTGTATCTCAGAGAAACTATTCATGGAGATG
GCTGAACTAATGGTAAGTGAAGGATGGAAGGATGCTGGTTATGAATACCTATGTATTGA
TGATTGCTGGATGGCTCCACAGCGTGATTCAGAAGGTAGGTTACAAGCTGACCCCCAGA
GATTCCCACATGGCATACGTCAGCTTGCAAACTACGTACACAGCAAGGGTCTAAAGTTA
GGCATCTACGCTGATGTCGGAAACAAGACATGTGCTGGTTTCCCAGGTTCATTCGGTTAC
TATGACATAGATGCGCAGACGTTTGCTGATTGGGGTGTTGATTTGTTGAAGTTTGATGGA
TGCTACTGCGATTCCCTGGAGAACCTAGCCGATGGGTACAAACACATGAGTTTGGCTCTA
AACAGGACTGGTAGGAGCATCGTCTATAGTTGTGAATGGCCCTTGTACATGTGGCCGTTT
CAGAAGCCAAACTACACTGAGATAAGACAATACTGTAACCATTGGCGTAACTTTGCTGA
CATAGATGATTCATGGAAGTCAATCAAATCTATCTTGGATTGGACTTCTTTCAACCAGGA
AAGAATTGTTGATGTTGCAGGTCCAGGTGGATGGAATGACCCTGATATGCTTGTCATAGG
GAACTTTGGGCTATCATGGAATCAACAAGTTACACAAATGGCTTTGTGGGCGATCATGGC
CGCACCCCTATTCATGTCTAATGATCTACGTCACATATCACCCCAAGCAAAGGCTTTACT
TCAAGATAAGGATGTCATAGCGATCAACCAAGATCCTCTTGGTAAACAAGGTTATCAATT
GAGACAAGGTGACAACTTTGAAGTGTGGGAAAGACCATTGTCTGGACTTGCGTGGGCTG
TTGCTATGATCAACCGTCAAGAGATCGGAGGGCCAAGATCTTACACTATCGCGGTAGCCT
CTTTGGGTAAGGGTGTTGCGTGCAATCCTGCCTGCTTCATTACACAATTGCTTCCAGTTAA
GAGAAAGTTGGGTTTCTATGAGTGGACATCTAGGCTAAGAAGTCACATCAATCCTACTGG
TACGGTATTGTTGCAATTGGAGAACACAATGCAAATGTCTTTGAAAGATTTGTTA
Polynucleotide Sequence of MFleader-GLA (yCDS):
(SEQ ID NO: 37)
ATGAGATTTCCTTCAATTTTTACTGCAGTTTTATTCGCAGCATCCTCCGCATTAGCTGCTC
CAGTCAACACTACAACAGAAGATGAAACGGCACAAATTCCGGCTGAAGCTGTCATCGGT
TACTTAGATTTAGAAGGGGATTTCGATGTTGCTGTTTTGCCATTTTCCAACAGCACAAAT
AACGGGTTATTGTTTATAAATACTACTATTGCCAGCATTGCTGCTAAAGAAGAAGGGGTA
TCTTTGGATAAAAGATTGGATAACGGGTTAGCCCGTACACCTACTATGGGTTGGCTTCAC
TGGGAAAGATTCATGTGTAACTTAGATTGCCAAGAAGAGCCTGACAGCTGTATCTCAGA
GAAACTATTCATGGAGATGGCTGAACTAATGGTAAGTGAAGGATGGAAGGATGCTGGTT
ATGAATACCTATGTATTGATGATTGCTGGATGGCTCCACAGCGTGATTCAGAAGGTAGGT
TACAAGCTGACCCCCAGAGATTCCCACATGGCATACGTCAGCTTGCAAACTACGTACACA
GCAAGGGTCTAAAGTTAGGCATCTACGCTGATGTCGGAAACAAGACATGTGCTGGTTTCC
CAGGTTCATTCGGTTACTATGACATAGATGCGCAGACGTTTGCTGATTGGGGTGTTGATT
TGTTGAAGTTTGATGGATGCTACTGCGATTCCCTGGAGAACCTAGCCGATGGGTACAAAC
ACATGAGTTTGGCTCTAAACAGGACTGGTAGGAGCATCGTCTATAGTTGTGAATGGCCCT
TGTACATGTGGCCGTTTCAGAAGCCAAACTACACTGAGATAAGACAATACTGTAACCATT
GGCGTAACTTTGCTGACATAGATGATTCATGGAAGTCAATCAAATCTATCTTGGATTGGA
CTTCTTTCAACCAGGAAAGAATTGTTGATGTTGCAGGTCCAGGTGGATGGAATGACCCTG
ATATGCTTGTCATAGGGAACTTTGGGCTATCATGGAATCAACAAGTTACACAAATGGCTT
TGTGGGCGATCATGGCCGCACCCCTATTCATGTCTAATGATCTACGTCACATATCACCCC
AAGCAAAGGCTTTACTTCAAGATAAGGATGTCATAGCGATCAACCAAGATCCTCTTGGTA
AACAAGGTTATCAATTGAGACAAGGTGACAACTTTGAAGTGTGGGAAAGACCATTGTCT
GGACTTGCGTGGGCTGTTGCTATGATCAACCGTCAAGAGATCGGAGGGCCAAGATCTTA
CACTATCGCGGTAGCCTCTTTGGGTAAGGGTGTTGCGTGCAATCCTGCCTGCTTCATTAC
ACAATTGCTTCCAGTTAAGAGAAAGTTGGGTTTCTATGAGTGGACATCTAGGCTAAGAAG
TCACATCAATCCTACTGGTACGGTATTGTTGCAATTGGAGAACACAATGCAAATGTCTTT
GAAAGATTTGTTA
Polypeptide Sequence of MFleader:
(SEQ ID NO: 38)
MRFPSIFTAVLFAASSALAAPVNTTTEDETAQIPAEAVIGYLDLEGDFDVAVLPFSNSTNNGLL
FINTTIASIAAKEEGVSLDKR
Polynucleotide sequence of Variant No. 395 yCDS:
(SEQ ID NO: 39)
TTGGATAACGGGTTAGCCCGTACACCTACTATGGGTTGGCTTCACTGGGAAAGATTCATG
TGTAACTTAGATTGCCAAGAAGAGCCTGACAGCTGTATCTCAGAGAAACTATTCATGGA
GATGGCTGAACGGATGGTAAGTGAAGGATGGAAGGATGCTGGTTATGAATACCTATGTA
TTGATGATTGCTGGATGGCTCCACAGCGTGATTCAGAAGGTAGGTTACAAGCTGACCCCC
AGAGATTCCCACATGGCATACGTCAGCTTGCAAACCATGTACACAGCAAAGGTCTAAAG
TTAGGCATCTACGCTGATGTCGGAAACAAGACATGTGCTGGTTTCCCAGGTTCATTCGGT
TACTATGACATAGATGCGCAGACGTTTGCTGATTGGGGTGTTGATTTGTTGAAGTTTGAT
GGATGCTACTGCGATTCCCTGGAGAACCTAGCCGATGGGTACAAACACATGAGTTTGGCT
CTAAACAGGACTGGTAGGAGCATCGTCTATAGTTGTGAATGGCCCTTGTACATGTGGCCG
TTTCAGAAGCCAAACTACACTGAGATAAGACAATACTGTAACCATTGGCGTAACTTTGCT
GACATAGATGATTCATGGGCTTCAATCAAATCTATCTTGGATTGGACTTCTCGTAACCAG
GAAAGAATTGTTGATGTTGCAGGTCCAGGTGGATGGAATGACCCTGATATGCTTGTCATA
GGGAACTTTGGGCTATCATGGGACCAACAAGTTACACAAATGGCTTTGTGGGCGATCAT
GGCCGCACCCCTATTCATGTCTAATGATCTACGTCACATATCACCCCAAGCAAAGGCTTT
ACTTCAAGATAAGGATGTCATAGCGATCAACCAAGATCCTCTTGGTAAACAAGGTTATCA
ATTGAGAAAAGGTGACAACTTTGAAGTGTGGGAAAGACCATTGTCTGGAGATGCGTGGG
CTGTTGCTATTATCAACCGTCAAGAGATCGGAGGGCCAAGATCTTACACTATCCCGGTAG
CCTCTTTGGGTAAGGGTGTTGCGTGCAATCCTGCCTGCTTCATTACACAATTGCTTCCAGT
TAAGAGACAATTGGGTTTCTATAACTGGACCTCTAGGCTAAAAAGTCACATTAATCCTAC
TGGTACGGTATTGTTGCAATTGGAGAACACAATGCAAATGTCTTTGAAAGATTTGTTA
Polypeptide sequence of Variant No. 395:
(SEQ ID NO: 40)
LDNGLARTPTMGWLHWERFMCNLDCQEEPDSCISEKLFMEMAERMVSEGWKDAGYEYLCI
DDCWMAPQRDSEGRLQADPQRFPHGIRQLANHVHSKGLKLGIYADVGNKTCAGFPGSFGYY
DIDAQTFADWGVDLLKFDGCYCDSLENLADGYKHMSLALNRTGRSIVYSCEWPLYMWPFQ
KPNYTEIRQYCNHWRNFADIDDSWASIKSILDWTSRNQERIVDVAGPGGWNDPDMLVIGNF
GLSWDQQVTQMALWAIMAAPLFMSNDLRHISPQAKALLQDKDVIAINQDPLGKQGYQLRK
GDNFEVWERPLSGDAWAVAIINRQEIGGPRSYTIPVASLGKGVACNPACFITQLLPVKRQLGF
YNVVTSRLKSHINPTGTVLLQLENTMQMSLKDLL
Polynucleotide sequence of Variant No. 402 yCDS:
(SEQ ID NO: 41)
TTGGATAACGGGTTAGCCCGTACACCTACTATGGGTTGGCTTCACTGGGAAAGATTCATG
TGTAACTTAGATTGCCAAGAAGAGCCTGACAGCTGTATCTCAGAGAAACTATTCATGGA
GATGGCTGAACGGATGGTAAGTGAAGGATGGAAGGATGCTGGTTATGAATACCTATGTA
TTGATGATTGCTGGATGGCTCCACAGCGTGATTCAGAAGGTAGGTTACAAGCTGACCCCC
AGAGATTCCCACATGGCATACGTCAGCTTGCAAACTACGTACACAGCAAAGGTCTAAAG
TTAGGCATCTACGCTGATGTCGGAAACAAGACATGTGCTGGTTTCCCAGGTTCATTCGGT
TACTATGACATAGATGCGCAGACGTTTGCTGATTGGGGTGTTGATTTGTTGAAGTTTGAT
GGATGCTACTGCGATTCCCTGGAGAACCTAGCCGATGGGTACAAACACATGAGTTTGGCT
CTAAACAGGACTGGTAGGCCGATCGTCTATAGTTGTGAATGGCCCTTGTACATGTGGCCG
TTTCAGAAGCCAAACTACACTGAGATAAGACAATACTGTAACCATTGGCGTAACTTTGCT
GACATAGATGATTCATGGGCTTCAATCAAATCTATCTTGGATTGGACTTCTCGTAACCAG
GAAAGAATTGTTGATGTTGCAGGTCCAGGTGGATGGAATGACCCTGATATGCTTGTCATA
GGGAACTTTGGGCTATCATGGGACCAACAAGTTACACAAATGGCTTTGTGGGCGATCAT
GGCCGCACCCCTATTCATGTCTAATGATCTACGTCACATATCACCCCAAGCAAAGGCTTT
ACTTCAAGATAAGGATGTCATAGCGATCAACCAAGATCCTCTTGGTAAACAAGGTTATCA
ATTGAGAAAAGGTGACAACTTTGAAGTGTGGGAAAGACCATTGTCTGGAGATGCGTGGG
CTGTTGCTATTATCAACCGTCAAGAGATCGGAGGGCCAAGATCTTACACTATCCCGGTAG
CCTCTTTGGGTAAGGGTGTTGCGTGCAATCCTGCCTGCTTCATTACACAATTGCTTCCAGT
TAAGAGACAATTGGGTTTCTATAACTGGACCTCTAGGCTAAAAAGTCACATTAATCCTAC
TGGTACGGTATTGTTGCAATTGGAGAACACAATGCAAATGTCTTTGAAAGATTTGTTA
Polypeptide sequence of Variant No. 402:
(SEQ ID NO: 42)
LDNGLARTPTMGWLHWERFMCNLDCQEEPDSCISEKLFMEMAERMVSEGWKDAGYEYLCI
DDCWMAPQRDSEGRLQADPQRFPHGIRQLANYVHSKGLKLGIYADVGNKTCAGFPGSFGYY
DIDAQTFADWGVDLLKFDGCYCDSLENLADGYKHMSLALNRTGRPIVYSCEWPLYMWPFQ
KPNYTEIRQYCNHWRNFADIDDSWASIKSILDWTSRNQERIVDVAGPGGWNDPDMLVIGNF
GLSWDQQVTQMALWAIMAAPLFMSNDLRHISPQAKALLQDKDVIAINQDPLGKQGYQLRK
GDNFEVWERPLSGDAWAVAIINRQEIGGPRSYTIPVASLGKGVACNPACFITQLLPVKRQLGF
YNVVTSRLKSHINPTGTVLLQLENTMQMSLKDLL
Polynucleotide sequence of Variant No. 625 yCDS:
(SEQ ID NO: 43)
TTGGATAACGGGTTAGCCCGTACACCTACTATGGGTTGGCTTCACTGGGAAAGATTCATG
TGTAACTTAGATTGCCAAGAAGAGCCTGACAGCTGTATCTCAGAGAAACTATTCATGGA
GATGGCTGAACGGATGGTAACCGAAGGATGGAAGGATGCTGGTTATGAATACCTATGTA
TTGATGATTGCTGGATGGCTCCACAGCGTGATTCAGAAGGTAGGTTACAAGCTGACCCCC
AGAGATTCCCACATGGCATACGTCAGCTTGCAAACCATGTACACAGCAAAGGTCTAAAG
TTAGGCATCTACGCTGATGTCGGAAACAAGACATGTGCTGGTTTCCCAGGTTCATTCGGT
TACTATGACATAGATGCGCAGACGTTTGCTGATTGGGGTGTTGATTTGTTGAAGTTTGAT
GGATGCTACTGCGATTCCCTGGAGAACCTAGCCGATGGGTACAAACACATGAGTTTGGCT
CTAAACAGGACTGGTAGGCCGATCGTCTATAGTTGTGAATGGCCCTTGTACATGTGGCCG
TTTCAGAAGCCAAACTACACTGAGATAAGACAATACTGTAACCATTGGCGTAACTTTGCT
GACATAGATGATTCATGGGCTTCAATCAAATCTATCTTGGATTGGACTTCTCGTAACCAG
GAAAGAATTGTTGATGTTGCAGGTCCAGGTGGATGGAATGACCCTGATATGCTTGTCATA
GGGAACTTTGGGCTATCATGGGACCAACAAGTTACACAAATGGCTTTGTGGGCGATCAT
GGCCGCACCCCTATTCATGTCTAATGATCTACGTGCGATATCACCCCAAGCAAAGGCTTT
ACTTCAAGATAAGGATGTCATAGCGATCAACCAAGATCCTCTTGGTAAACAAGGTTATCA
ATTGAGAAAAGGTGACAACTTTGAAGTGTGGGAAAGACCATTGTCTGGAGATGCGTGGG
CTGTTGCTATTATCAACCGTCAAGAGATCGGAGGGCCAAGATCTTACACTATCCCGGTAG
CCTCTTTGGGTAAGGGTGTTGCGTGCAATCCTGCCTGCTTCATTACACAATTGCTTCCAGT
TAAGAGACAATTGGGTTTCTATAACTGGACCTCTAGGCTAAAAAGTCACATTAATCCTAC
TGGTACGGTATTGTTGCAATTGGAGAACACAATGCAAACCTCTTTGAAAGATTTGTTA
Polypeptide sequence of Variant No. 625:
(SEQ ID NO: 44)
LDNGLARTPTMGWLHWERFMCNLDCQEEPDSCISEKLFMEMAERMVTEGWKDAGYEYLCI
DDCWMAPQRDSEGRLQADPQRFPHGIRQLANHVHSKGLKLGIYADVGNKTCAGFPGSFGYY
DIDAQTFADWGVDLLKFDGCYCDSLENLADGYKHMSLALNRTGRPIVYSCEWPLYMWPFQ
KPNYTEIRQYCNHWRNFADIDDSWASIKSILDWTSRNQERIVDVAGPGGWNDPDMLVIGNF
GLSWDQQVTQMALWAIMAAPLFMSNDLRAISPQAKALLQDKDVIAINQDPLGKQGYQLRK
GDNFEVWERPLSGDAWAVAIINRQEIGGPRSYTIPVASLGKGVACNPACFITQLLPVKRQLGF
YNVVTSRLKSHINPTGTVLLQLENTMQTSLKDLL
Polynucleotide sequence of Variant No. 648 yCDS:
(SEQ ID NO: 45)
TTGGATAACGGGTTAGCCCGTACACCTCCGATGGGTTGGCTTCACTGGGAAAGATTCATG
TGTAACTTAGATTGCCAAGAAGAGCCTGACAGCTGTATCTCAGAGAAACTATTCGAAGA
GATGGCTGAACGGATGGTAACCGAAGGATGGAAGGATGCTGGTTATGAATACCTATGTA
TTGATGATTGCTGGATGGCTCCACAGCGTGATTCAGAAGGTAGGTTACAAGCTGACCCCC
AGAGATTCCCACATGGCATACGTCAGCTTGCAAACCATGTACACAGCAAAGGTCTAAAG
TTAGGCATCTACGCTGATGTCGGAAACAAGACATGTGCTGGTTTCCCAGGTTCATTCGGT
TACTATGACATAGATGCGCAGACGTTTGCTGATTGGGGTGTTGATTTGTTGAAGTTTGAT
GGATGCTACTGCGATTCCCTGGAGAACCTAGCCGATGGGTACAAACACATGAGTTTGGCT
CTAAACAGGACTGGTAGGCCGATCGTCTATAGTTGTGAATGGCCCTTGTACATGTGGCCG
TTTCAGAAGCCAAACTACACTGAGATAAGACAATACTGTAACCATTGGCGTAACTTTGCT
GACATAGATGATTCATGGGCTTCAATCAAATCTATCTTGGATTGGACTTCTCGTAACCAG
GAAAGAATTGTTGATGTTGCAGGTCCAGGTGGATGGAATGACCCTGATATGCTTGTCATA
GGGAACTTTGGGCTATCATGGGACCAACAAGTTACACAAATGGCTTTGTGGGCGATCAT
GGCCGGCCCCCTATTCATGTCTAATGATCTACGTGCGATATCACCCCAAGCAAAGGCTTT
ACTTCAAGATAAGGATGTCATAGCGATCAACCAAGATCCTCTTGGTAAACAAGGTTATCA
ATTGAGAAAAGGTGACAACTTTGAAGTGTGGGAAAGACCATTGTCTGGAGATGCGTGGG
CTGTTGCTATTATCAACCGTCAAGAGATCGGAGGGCCAAGATCTTACACTATCCCGGTAG
CCTCTTTGGGTAAGGGTGTTGCGTGCAATCCTGCCTGCTTCATTACACAATTGCTTCCAGT
TAAGAGACAATTGGGTTTCTATAACGCAACCTCTAGGCTAAAAAGTCACATTAATCCTAC
TGGTACGGTATTGTTGCAATTGGAGAACACAATGCAAACCTCTTTGAAAGATTTGTTA
Polypeptide sequence of Variant No. 648:
(SEQ ID NO: 46)
LDNGLARTPPMGWLHWERFMCNLDCQEEPDSCISEKLFEEMAERMVTEGWKDAGYEYLCI
DDCWMAPQRDSEGRLQADPQRFPHGIRQLANHVHSKGLKLGIYADVGNKTCAGFPGSFGYY
DIDAQTFADWGVDLLKFDGCYCDSLENLADGYKHMSLALNRTGRPIVYSCEWPLYMWPFQ
KPNYTEIRQYCNHWRNFADIDDSWASIKSILDWTSRNQERIVDVAGPGGWNDPDMLVIGNF
GLSWDQQVTQMALWAIMAGPLFMSNDLRAISPQAKALLQDKDVIAINQDPLGKQGYQLRK
GDNFEVWERPLSGDAWAVAIINRQEIGGPRSYTIPVASLGKGVACNPACFITQLLPVKRQLGF
YNATSRLKSHINPTGTVLLQLENTMQTSLKDLL

### Example 1

### GLA Gene Acquisition and Construction of Expression Vectors

[0180] Synthetic genes (SEQ ID NO: 1) coding for the WT human GLA sequence (SEQ ID NO: 2) and derived variants (SEQ ID NO: 4, SEQ ID NO: 6) were constructed as previously described (See e.g. US Pat. Appln. Publn. No. 2017/0360900 A1). For secreted expression and transient transfection in mammalian cells, a chimeric GLA expression construct comprising a polynucleotide encoding a synthetic mouse IG signal peptide fused to a synthetic gene coding for the different GLA variants was generated as follows. Oligonucleotides BamHI-pcDNA-GLA-F (SEQ ID NO: 63) and XhoI-pcDNA-GLA-R (SEQ ID NO: 64) were used to amplify a fragment coding for a signal peptide and the coding sequence for the mature form of GLA variants. The PCR product was ligated into the BamHI/XhoI linearized mammalian expression vector pcDNA3.1(+) (Invitrogen), or a vector containing a CMV promoter and BGH-pA (bovine growth hormone polyadenylation) sequence. Directed evolution techniques generally known by those skilled in the art were used to generate gene variants derived from SEQ ID NO: 8 within this plasmid construct (See e.g., U.S. Pat. No. 8,383,346 and WO2010/144103).

### Example 2

### High-Throughput Growth and Assays

### High-Throughput (HTP) Growth of GLA and GLA Variants

[0181] HEK 293T cells were transfected with pcDNA 3.1(+) or a CMV promoter and BGH-pA containing vectors encoding a synthetic mouse IG signal peptide fused to wild type GLA or GLA variants using the lipofection method with LIPOFECTAMINE® 3000 Reagent (ThermoFisher Scientific). HEK 293T cells were cultured in growth medium (DMEM with 10% fetal bovine serum [both from Corning]). 24 hours before transfection, cells were seeded to NUNC® Edge 2.0 96-well plate (ThermoFisher Scientific) at densities of 10⁵ cells/well/250 μL in growth medium, and incubated at 37° C., 5% CO₂ in an incubator. Cells were incubated for 24-72 hours at 37° C. and 5% CO₂, to allow for expression and secretion of GLA variants. Conditioned media (50-100 μL) from the HEK293T transfections were transferred into Corning 96-well solid black plates (Corning) for activity and/or stability analysis.

### HTP-Analysis of Supernatants

[0182] GLA variant activity was determined by measuring the hydrolysis of 4-methylumbelliferyl α-D-galactopyranoside (MUGal). For an unchallenged assay, 50 μL of HEK 293T conditioned media produced as described above were mixed with 50 μL of 1 mM MUGal in McIlvaine Buffer (McIlvaine, J. Biol. Chem., 49:183-186 [1921]), pH 4.8, in a 96-well, black, opaque bottom microtiter plate. The reactions were mixed briefly and incubated at 37° C. for 30-180 minutes, prior to quenching with 100 μL of 0.5 M sodium carbonate pH 10.2. Hydrolysis was analyzed using a SPECTRAMAX® M2 microplate reader monitoring fluorescence (Ex. 355 nm, Em. 460 nm). Results from this assay are presented in Table 2-1.

HTP-Analysis of Supernatants Pretreated with Acid

[0183] GLA variants were challenged with acidic buffer to simulate the extreme pH that the variants may encounter within lysosomes. First, 50 μL of HEK 293T conditioned media and 50 uL of McIlvaine buffer (pH 3.3-4.3) were added to the wells of a 96-well round bottom microtiter plate. The plates were sealed with a PlateLoc® thermal microplate sealer (Agilent), and incubated at 37° C. for 1-2 h. For the pH 4 challenge assay, 50 μL of acid-pH-challenged sample were mixed with 50 uL of 1 mM MUGal in McIlvaine buffer pH 4.4. The reactions were mixed briefly and incubated at 37° C. for 30-180 minutes, prior to quenching with 100 μL of 0.5 M sodium carbonate, pH 10.2. Hydrolysis was analyzed using a SPECTRAMAX® M2 microplate reader monitoring fluorescence (Ex. 355 nm, Em. 460 nm). Results from this assay are presented in Table 2-1.

HTP-Analysis of Supernatants Pretreated with Base

[0184] GLA variants were challenged with basic (neutral) buffer to simulate the pHs that the variants encounter in the blood following administration to a patient. First, 50 μL of GLA variants HEK 293T conditioned media and 50 μL of McIlvaine buffer (pH 7.0-8.2) were added to the wells of a 96-well round bottom microtiter plate. The plates were sealed and incubated at 37° C. for 1-18 h. For the pH 7 challenge assay, 50 μL of basic-pH-challenged sample was mixed with 50 μL of 1 mM MUGal in McIlvaine buffer pH 4.4. The reactions were mixed briefly and incubated at 37° C. for 30-180 minutes, prior to quenching with 100 μL of 0.5 M sodium carbonate pH 10.2. Hydrolysis was analyzed using a SPECTRAMAX® M2 microplate reader monitoring fluorescence (Ex. 355 nm, Em. 460 nm). Results from this assay are presented in Table 2-1.

TABLE 2-1
Activity of GLA Variants Relative to SEQ ID NO: 8 After No
Challenge (Unchallenged) or Challenge at the Indicated pH¹

| | Amino Acid | | | |
|---|---|---|---|---|
| | Differences | | pH 4 | pH 7 |
| SEQ ID NO: | (Relative to | Unchallenged | Challenge | Challenge |
| (nt/aa) | SEQ ID NO: 8) | FIOPC | FIOPC | FIOPC |
| 7/8 | | ++ | ++ | ++ |
| 9/10 | R44L/D247N/P337A | ++ | ++++ | |
| 11/12 | R44L/K302Q | ++ | ++++ | + |
| 13/14 | R44L/D247N/K302Q | ++ | ++++ | |
| 15/16 | R217F/K373R | | ++++ | + |
| 17/18 | I322M/P337A | ++++ | ++++ | ++ |
| 19/20 | R44L/D247N/K302Q/I322M | ++ | ++++ | |
| 21/22 | K302Q/I322M/Q362K/K373R | +++ | ++++ | + |
| 23/24 | I322M | +++ | +++ | ++ |
| 25/26 | K302Q/P337A | ++ | +++ | + |
| 27/28 | R44L/R217F/I322M | +++ | +++ | ++ |
| 29/30 | R44L/D247N/I322M | ++ | +++ | |
| 31/32 | R44L/P337A | ++ | +++ | + |
| 33/34 | R44L/K373R | ++ | +++ | + |
| 35/36 | R44L/D247N | +++ | +++ | ++ |
| 37/38 | R217F/I322M | +++ | +++ | + |
| 39/40 | R44L/R217F/D316L | ++ | +++ | + |
| 41/42 | D247N/Q362K | ++ | +++ | |
| 43/44 | R44L/R217F | +++ | +++ | ++ |
| 45/46 | K373R | ++ | ++ | + |
| 47/48 | D247N/I322M | ++ | ++ | |
| 49/50 | R44L | ++ | ++ | + |
| 51/52 | D316L | ++ | ++ | + |
| 53/54 | R44L/D247N/Q362K | ++ | ++ | |
| 55/56 | D316L/P337A | ++ | ++ | |
| 57/58 | Q362K/K373R | ++ | + | |
| 59/60 | R44L/R217F/I322M/P337A | | + | |

¹Levels of increased activity were determined relative to the reference polypeptide of SEQ ID NO: 8, and defined as follows: “+” >0.75; “++” >0.9; “+++” >1.1; and “++++” >1.2.

### Example 3

### Production of GLA Variants

### Production of GLA in HEK293T Cells

[0185] Secreted expression of GLA variants in mammalian cells was performed by transient transfection of HEK293, HEK293T, or Expi293 cells. Cells were transfected with GLA variants (SEQ ID NOS: 3, 4, 9, 12, 17, 20, 23, and 41) fused to an N-terminal synthetic mammalian signal peptide and subcloned into the mammalian expression vector pLEV113, as described in Example 1. HEK293 cells were transfected with plasmid DNA and grown in suspension for 4 days using standard techniques known to those skilled in the art. Supernatants were collected and stored at 4° C. until analyzed.

### Example 4

### Purification of GLA Variants

### Purification of GLA Variants From Mammalian Cell Supernatants

[0186] WT GLA (SEQ ID NO: 2) was purified from mammalian culture supernatant as described in the literature (Yasuda et al., Prot. Exp. Pur. 37:499-506 [2004]). All other GLA variants were purified as follows. GLA variants were purified from mammalian culture supernatant essentially as known in the art (See, Yasuda et al., Prot. Exp. Pur. 37:499-506 [2004]). Concanavalin A resin (Sigma Aldrich) was equilibrated with 0.1 M sodium acetate, 0.1 M NaCl, 1 mM MgCl₂, CaCl₂, and MnCl₂, pH 6.0 (Concanavalin A binding buffer). Supernatant was sterile-filtered with 0.2 μm bottle-top filter before it was loaded onto the column. After loading, the column was washed with 10 column volumes of Concanavalin A binding buffer and the bound protein was eluted with Concanavalin A binding buffer supplemented with 0.9 M methyl-α-D-mannopyranoside and 0.9 M methyl-α-D-glucopyranoside. Eluted protein was concentrated and the buffer exchanged into storage buffer (20 mM sodium phosphate, 150 mM sodium chloride, 185 μM TWEEN®-20 non-ionic detergent, pH 6.0) using an Amicon® Ultra 15 mL filtration unit with a 30 kDa molecular weight cut off (Millipore) membrane. The GLA in storage buffer was sterile filtered through ANOTOP® 0.2 μm syringe filters (Whatman), and stored at −80° C. Purification provided 2.4-50 μg of purified protein/ml of culture supernatant based on BCA quantitation.

### Protein Quantification by the BCA Protein Assay

[0187] A bicinchoninic acid (BCA) protein assay (Sigma Aldrich) was used to quantify purified GLA. In microtiter plate, 25 uL of protein standards and purified GLA with proper dilution were mixed with 200 uL of working reagent containing 50 parts of BCA reagent A and 1 part of BCA reagent B. The plate was thoroughly mixed on a plate shaker for 30 seconds and incubated at 37° C. for 30 minutes. After the plates cooled down to room temperature, absorbance of the samples was measured at 562 nm using a plate reader.

### Example 5

### In Vitro Characterization of GLA Variants

### Thermostability of GLA Variants Expressed in HEK 293T Cells

[0188] GLA variants were exposed to various temperature challenges to assess the overall stability of the enzyme. First, 50 μL of purified HEK 293T expressed GLA and GLA variants in 1×PBS pH 6.2 were added to the wells of a 96-well PCR plate (Biorad, HSP-9601). The plates were sealed and incubated at 30-50° C. for 1 h using the gradient program of a thermocycler. For the assay, 25 μL of challenged supernatant was mixed with 25 μL of 1 mM MUGal in McIlvaine buffer pH 4.4. The reactions were mixed briefly and incubated at 37° C. for 60 minutes, prior to quenching with 100 μL of 0.5 M sodium carbonate, pH 10.2. Hydrolysis was analyzed using a SPECTRAMAX® M2 microplate reader monitoring fluorescence (Ex. 355 nm, Em. 460 nm). The percent residual activity was calculated for 1h incubations at temperatures ranging from 30° C. to 50° C., by dividing the activity of challenged samples by the activity of unchallenged samples, in which “unchallenged” is the hydrolysis measured at time 0, and “challenged” is hydrolysis measured at 1 hour at the specified temperature for each variant. Results from this assay are shown in Table 5-1. FIG. 1 provides a graph showing the residual activity of GLA variants after 1 hr incubation at various temperatures.

### Serum Stability of GLA Variants Expressed in HEK 293T Cells

[0189] To assess the relative stability of variants in the presence of blood, samples were exposed to serum. First, 100 μL of 7.5 ug/mL purified GLA variants in 1×PBS pH 6.2 and 90 uL of human serum were added to the wells of a COSTAR® 96-well round bottom plate (Corning). The plates were sealed and incubated at 37° C. for 0-24h. For the assay, 50 μL of challenged supernatant were mixed with 50 μL of 1 mM MUGal in McIlvaine buffer pH 4.4. The reactions were mixed briefly and incubated at 37° C. for 90 minutes, prior to quenching with 100 μL of 0.5 M sodium carbonate, pH 10.2. Hydrolysis was analyzed using a SPECTRAMAX® M2 microplate reader monitoring fluorescence (Ex. 355 nm, Em. 460 nm). Percent residual activity in serum after 24h was calculated by dividing the activity of challenged samples by the activity of unchallenged samples, in which “unchallenged” is hydrolysis measured at time 0 and “challenged” is hydrolysis measured at the specified time points for each variant. The results are shown in Table 5.1. FIG. 2 provides a graph showing the residual activity of GLA variants after a challenge with human serum for 0-24 hrs.

### Lysosomal Stability of GLA Variants Expressed in HEK 293T Cells

[0190] To assess the relative stability of variants in the presence of lysosomal proteases and other lysosomal components, GLA variants were exposed to human lysosomal lysate (XenoTech, #H0610.L) following the manufacturer's instructions with some modifications, as described herein. Briefly, GLA variants were diluted to an appropriate concentration range (0.0625-0.0078125 mM) and 10 μL of the dilutions were combined with 10 μL of a 1:20 dilution of human lysosomal lysate in 2× catabolic buffer (XenoTech, #K5200) in a COSTAR® 96-well round bottom plate (#3798, Corning). The plates were sealed and incubated at 37° C. for 0-24h. For the assay, 50 μL of challenged supernatant was mixed with 50 μL of 1 mM MUGal in McIlvaine buffer pH 4.4. The reactions were mixed briefly and incubated at 37° C. for 90 minutes, prior to quenching with 100 μL of 0.5 M sodium carbonate pH 10.2. Hydrolysis was analyzed using a SPECTRAMAX® M2 microplate reader monitoring fluorescence (Ex. 355 nm, Em. 460 nm). Percent residual activity in lysosomal extract after 24h was calculated by dividing the activity of challenged samples by the activity of unchallenged samples, in which “unchallenged” is hydrolysis measured at time 0 and “challenged” is hydrolysis measured at 4 and 24 hours for each variant. The results are provided in Table 5.1. FIG. 3 provides a graph showing the residual activity of GLA variants after challenge with human lysosomal extract for 0 to 24 hrs.

### Cellular Uptake in Fabry Fibroblasts of Purified GLA Variants Expressed in HEK293T Cells

[0191] Cellular uptake of GLA variants as compared to a reference enzyme (WT GLA [SEQ ID NO: 2]), was determined to assess the overall ability of the variants to be endocytosed into cultured cells. Fabry fibroblasts (GM02775, Coriell Institute for Medical Research) were seeded into a 12-well culture dish (VWR, #10861-698) containing Minimal Essential Media (MEM; Gibco #11095-080, supplemented with 1% non-essential amino acids (NEAA; Gibco #11140-050) and 15% fetal bovine serum (Corning #35-016-CV)) and allowed to grow to confluency (2-3 days at 37° C., 5% CO₂). After reaching confluency, supplemented MEM was removed by sterile vacuum and replaced with 1 mL/well serum-free MEM+1% NEAA. Enzymes purified as described in Example 4, were added to cells at 10 ug GLA/mL and allowed to incubate for 4 hours at 37° C., 5% CO₂. Serum-free media was aspirated by sterile vacuum, the cells briefly washed with 1 mL 1×PBS/well, and PBS aspirated by sterile vacuum. Cells were then trypsinized with 200 μL/well 0.25% trypsin-EDTA (VWR #02-0154-0100) and incubated for ˜5 minutes at room temperature to dislodge adherent cells from the plate and degrade remaining extracellular GLA. Then, 500 μL serum-free MEM was added to each well, and the samples transferred to 1.5 mL microcentrifuge tubes. Samples were centrifuged at 8000 RPM for 5 min. to pellet the cells. Media was gently aspirated with a 1000 μL pipette. The cell pellets were resuspended in 500 μL 1×PBS, re-pelleted at 8000 RPM for 5 min, and the PBS was gently removed. Then, 100 μL Lysis Buffer (0.2% TRITON X-100™ non-ionic surfactant (Sigma #93443) diluted in 1×PBS) was added to each sample, followed by sonication for 1-2 minutes, and centrifugation at 12,000-14,000 RPM for 10 minutes at 4° C. Supernatant was transferred to a sterile PCR tube for protein and activity assay. For the activity assay, 10 μL of cell lysis sample was mixed with 50 μL of 2.5 mM MUGal in McIlvaine buffer, pH 4.6. The reaction plates were sealed and incubated at 37° C. for 60 minutes, prior to reaction quenching with 140 μL of 0.5 M sodium carbonate pH 10.2, per well. MUGal hydrolysis was determined using a SPECTRAMAX® M2 microplate reader monitoring fluorescence (Ex. 355 nm, Em. 460 nm). For the protein quantification, the BCA assay was carried out following the manufacturer's instructions (Pierce, #23225) with the following modifications: 10 μL of cell lysis sample were mixed with 190 μL BCA Working Reagent, and the plates sealed and incubated at 37° C. for 60 minutes. Samples were analyzed using a SPECTRAMAX® M2 microplate reader monitoring absorbance (562 nm). The protein concentrations were calculated from a BSA standard curve. Cellular uptake of each GLA variant was calculated by first subtracting background non-enzymatic fluorescence of the untreated cells from enzyme-treated samples, and then normalizing to the protein concentration in each well. Cellular uptake FIOPC was calculated by dividing the normalized GLA variant intracellular activity by the corresponding activity of the control (WT). FIG. 4 provides a graph of the cellular uptake of purified GLA variants in cultured Fabry patient fibroblasts, expressed as relative activity compared to wild type (SEQ ID NO: 2), after 4 hours incubation at 37° C.

TABLE 5-1
Relative Activity and Cellular Uptake of GLA Variants Produced in HEK293T Cells¹

| | Amino Acid | Lysosomal | % | % | Serum |
|---|---|---|---|---|---|
| | Differences | Stability % | Residual | Residual | Stability % |
| | (Relative to | Residual | Activity at | Activity at | Residual |
| SEQ ID NO: | SEQ ID NO: | Activity | 37° C. | 50° C. | Activity |
| (nt/aa) | 8) | at 24 h | (1 h) | (1 h) | at 24 h |
| 1/2 | P10T/E39M/R44L/T47S/ | | + | + | |
| | H92Y/P166S/A206K/ | | | | |
| | R217F/D247N/G261A/ | | | | |
| | A271H/K302Q/D316L/ | | | | |
| | I322M/P337A/Q362K/ | | | | |
| | A368W/K373R/T392M | | | | |
| 7/8 | | +++ | ++++ | +++ | +++ |
| 15/16 | R217F/K373R | +++ | ++++ | ++++ | |
| 57/58 | Q362K/K373R | +++ | ++++ | ++++ | + |
| 59/60 | R44L/R217F/I322M/P337A | +++ | ++++ | ++++ | |
| 39/40 | R44L/R217F/D316L | +++ | ++++ | ++++ | |
| 61/62 | P166A/Q362K | +++ | ++++ | ++++ | +++ |

¹The percent (%) residual activity at 35° C. and 50° C., as well as lysosomal and serum stability percent (%) residual activity, were determined relative to each individual variant and defined as follows: “+” >50%; “++” >60%; “+++” >80%; and “++++” >95%. The residual activity for each variant at 1 hour was determined, relative to its activity at time 0.

### HTP-Analysis of GLA Activity in Lysates of Fabry Fibroblasts

[0192] GLA variants produced in HTP were challenged to be taken up into cells and retain activity over 24 to 96 hours. Fabry fibroblasts (GM02775, Coriell Institute for Medical Research) were plated and allowed to grow to confluency over 24-72 hours. After reaching confluency, media was removed using an automated BioMek i5 liquid handling robot. Conditioned media from HEK293T cells transiently transfected as described above, were added to the Fabry fibroblasts and the cells allowed to incubate with the GLA variants for 2-4 hours at 37° C., 5% CO₂. GLA-containing conditioned media were removed with an automated BioMek i5 liquid handling robot. Then, the cells were briefly washed with 150 μL 1×DPBS/well, and the DPBS was removed with an automated BioMek i5 liquid handling robot. Then, 200 μL of the complete growth medium were added to each well, and the plates were returned to the incubator for 24-72 hours. At the conclusion of incubation, complete growth media was removed with an automated BioMek i5 liquid handling robot. The cells were washed with 150 μL 1×DPBS/well, and the DPBS was removed with an automated BioMek i5 liquid handling robot. The cells were lysed via addition of 50 μL of McIlvaine buffer, pH 4.4, supplemented with 0.2% TRITON X-100 ™ non-ionic surfactant (Sigma #93443)) and agitation at room temperature for 30 minutes. Activity was assessed by addition of 50 μL of 1.5 mM MuGal in McIlvaine buffer, pH 4.4. The plates were sealed and incubated at 37° C. for 360 minutes with agitation at 400 rpm, prior to quenching with 100 μL of 0.5 M sodium carbonate, pH 10.2. Hydrolysis was analyzed using a SPECTRAMAX® M2 microplate reader monitoring fluorescence (Ex. 355 nm, Em. 460 nm). Cellular uptake FIOPC was calculated by dividing normalized GLA variant intracellular activity by the corresponding activity of the reference sequence.

### HTP-Analysis of GLA Induced Depletion of Globotriaosylceramide in Fabry Fibroblasts

[0193] GLA variants produced in HTP were challenged to be taken up into cells and reduce the cellular load of globotriaosylceramide. Fabry fibroblasts (GM02775, Coriell Institute for Medical Research) were plated and allowed to grow to confluency over 24-72 hours. After reaching confluency, media were removed by automated a BioMek i5 liquid handling robot. Conditioned media produced by HEK293T cells transiently transfected as described above, were added to the fibroblast cells and allowed to incubate for 2-4 hours at 37° C., 5% CO₂. GLA-containing conditioned media were removed with an automated BioMek i5 liquid handling robot. Then, the cells were briefly washed with 150 μL 1×DPBS/well, and the DPBS was removed with an automated BioMek i5 liquid handling robot. Then, 200 μL of the complete growth medium was added to each well, and the plates were returned to the incubator for 24-72 hours. At the conclusion of incubation, the complete growth media was removed with an automated BioMek i5 liquid handling robot. Then, the cells were washed with 150 μL 1×DPBS/well, and the DPBS was removed with an automated BioMek i5 liquid handling robot. Globotriaosylceramide was extracted into 200 uL methanol supplemented with 10 ng/mL N-heptadecanoyl-ceramide trihexoside for 30 minutes at room temperature with gentle agitation. Methanol extractions were filtered through a Millipore hydrophobic filter stack into round bottom 96-well plates. Cellular globotriaosylceramide was quantified essentially as known in the art (See, Provencal et al., Bioanal., 8:1793-1807 [2016]) by LC-MS/MS. The sum of peak integrations for each cell sample was determined and globotriaosylceramide FIOPC was calculated by dividing the change in normalized GLA variant globotriaosylceramide levels by the reference sequence.

### Example 6

### GLA Variants Derived from SEQ ID NO: 58

[0194] In this Example, experiments conducted to assess activity of and Gb3 clearance by GLA variants in Fabry fibroblasts are described. In this Example, SEQ ID NO: 58 was used as the reference sequence (i.e., the amino acid differences in the variants are indicated relative to SEQ ID NO: 58, and the assay results are reported relative to the results obtained for SEQ ID NO: 58). In these experiments, the GLA variants were tested for MU-Gal activity without pre-incubation, as described in Example 5. Variants were also tested for Gb3 depletion in Fabry fibroblasts as described in Example 5.

TABLE 6-1
Relative Performance of GLA Variants in Unchallenged
Conditions and in Depletion of Gb3 in Fabry Fibroblast
Cells (Relative to SEQ ID NO: 58)¹

| | Amino Acid | | Gb3 |
|---|---|---|---|
| | Differences | | Depletion |
| | (Relative to | | in Fabry |
| SEQ ID NO: | SEQ ID NO: | Unchallenged | Fibroblast |
| (nt/aa) | 58) | FIOPC | Cells |
| 67/68 | R7L/Y120H | + | + |
| 69/70 | R7L/F365V | + | |
| 71/72 | R7L/Q88A/Y120H/ | ++ | |
| | N305G/F365V | | |
| 73/74 | R7L/N305G | ++ | + |
| 75/76 | Q88A | ++ | |
| 77/78 | D282N | ++ | + |
| 79/80 | Q299R/L300I | ++ | |
| 81/82 | Y120H | ++ | |
| 83/84 | R7L | +++ | + |
| 85/86 | R7L/N305G/F365V | +++ | |
| 87/88 | Y120H/Q299R/N305G | +++ | |
| 89/90 | R7L/E48D/Q68E/ | +++ | ++ |
| | Y120H/D282N/Q299R | | |
| 91/92 | E48D | +++ | ++ |
| 93/94 | Q68E | +++ | ++ |
| 95/96 | R7L/D130E | +++ | ++ |
| 97/98 | P67T/F180G | +++ | |
| 99/100 | R7L/E48D/F180G | +++ | |
| 101/102 | F365V | +++ | |
| 103/104 | L300I | +++ | ++ |
| 105/106 | R7L/E48D/Q68E | +++ | ++ |
| 107/108 | E48D/F180G/D282N | +++ | |
| 109/110 | F180G | +++ | |
| 111/112 | Q299R/L300I/N305G/ | +++ | |
| | F365V | | |
| 113/114 | D282N/F365V | ++++ | |
| 115/116 | E48D/D282N/N305G | ++++ | + |
| 117/118 | R7L/Q68E/F180G | ++++ | |
| 119/120 | N305G | ++++ | ++ |
| 121/122 | Q68E/Q299R/L300I | ++++ | ++ |
| 123/124 | R7L/E48D/D130E/D282N | ++++ | ++ |
| 125/126 | E48D/Q68E | ++++ | +++ |
| 127/128 | N305G/F365V | ++++ | |
| 129/130 | R7L/D282N | ++++ | + |
| 131/132 | R7L/Q68E/D130E/ | ++++ | ++ |
| | D282N/F365V | | |
| 133/134 | E48D/D282N | ++++ | ++ |
| 135/136 | A206S | ++ | |
| 137/138 | K343D | | +++ |
| 139/140 | K343G | ++ | ++ |
| 141/142 | K96L | ++ | +++ |
| 143/144 | K96L/P312Q/K343G | ++ | |
| 145/146 | K96L/S273P | + | +++ |
| 147/148 | L158A/R162K/S273G | | ++ |
| 149/150 | L158R | + | |
| 151/152 | N91Q/S95E | | +++ |
| 153/154 | N91Q/S95E/K96L | | +++ |
| 155/156 | R162H/K343D | + | |
| 157/158 | R162K | ++ | +++ |
| 159/160 | R162K/S273P | + | +++ |
| 161/162 | R162S | ++ | +++ |
| 163/164 | R87K/K96I/H155N/ | | ++ |
| | S273P/K343G | | |
| 165/166 | R87K/N91Q/S95E/ | + | |
| | K96L/A206S/K343G | | |
| 167/168 | R87K/N91Q/S95E/ | | +++ |
| | K96L/L158A/R162K | | |
| 169/170 | S273P | | +++ |
| 171/172 | S273P/K343G | ++ | |
| 173/174 | T47D | ++ | ++ |
| 175/176 | T47D/K343G | + | ++ |
| 177/178 | T47D/R87K/S95E/K96L/ | | ++ |
| | L158R/R162H | | |
| 179/180 | T47D/S273P | ++ | +++ |
| 181/182 | T47D/S95E | | +++ |
| 183/184 | W178G | + | |
| 185/186 | T389K | + | |
| 187/188 | F180T | +++ | |
| 189/190 | F365A | ++++ | |
| 191/192 | F180V | ++++ | |
| 193/194 | L158A | + | |
| 195/196 | F180L | + | |
| 197/198 | S370G | ++ | |
| 199/200 | L398S | +++ | |
| 201/202 | L397A | ++ | |
| 203/204 | A206K | ++++ | |
| 205/206 | P166K | +++ | |
| 207/208 | A271R | + | |
| 209/210 | D396G/L398T | ++ | |
| 211/212 | W178S | + | + |
| 213/214 | S314A | + | + |
| 215/216 | S71P | ++ | + |
| 217/218 | L394K | | + |
| 219/220 | Q181A | + | + |
| 221/222 | V345A | ++ | + |
| 223/224 | V93I | | + |
| 225/226 | F365Q | ++ | + |
| 227/228 | I336V | ++ | + |
| 229/230 | H92F | + | + |
| 231/232 | L398V | +++ | + |
| 233/234 | L398P | +++ | ++ |
| 235/236 | R301M | ++++ | ++ |
| 237/238 | P337R | ++ | ++ |
| 239/240 | S333G | +++ | ++ |
| 241/242 | L363Q | ++++ | ++ |
| 243/244 | T47V | | ++ |
| 245/246 | H92T | ++++ | ++ |
| 247/248 | S393V | + | ++ |
| 249/250 | D151L | | ++ |
| 251/252 | S333F | ++++ | ++ |
| 253/254 | L293P/Q391A | ++ | ++ |
| 255/256 | V345Q | + | ++ |
| 257/258 | E39V | | ++ |
| 259/260 | R217K | ++ | ++ |
| 261/262 | L398A | | +++ |

¹All activities were determined relative to the reference polypeptide of SEQ ID NO: 58. Levels of increased activity are defined as follows: “+” =0.9 to 1.1; “++” >1.1; “+++” >1.5; and “++++” >2.

### Example 7

### GLA Variants Derived from SEQ ID NO: 158

[0195] In this Example, experiments conducted to assess the activity, stability at pH 7.4, and intracellular activity in Fabry fibroblasts of GLA variants are described. In this Example, the reference sequence was SEQ ID NO: 158 (i.e., the amino acid differences in the variants are indicated relative to SEQ ID NO: 158, and the assay results are reported relative to the results for SEQ ID NO: 158). The variants were tested for GLA MU-Gal activity without pre-incubation (unchallenged) and after pH 7.4 pre-incubation as described in Example 5. Variants were also tested for MU-Gal activity after lysis of Fabry fibroblasts incubated with GLA variants as described in Example 5.

TABLE 7-1
Relative performance of GLA Variants (Relative to SEQ ID NO: 158)

| | Amino Acid | | | Stability |
|---|---|---|---|---|
| | Differences | | | after |
| | (Relative to | | | pH 7.4 |
| SEQ ID NO: | SEQ ID NO: | Unchallenged | Lysate | Preincubation |
| (nt/aa) | 158) | FIOPC | FIOPC | FIOPC |
| 263/264 | E48D | ++ | + | ++++ |
| 265/266 | E48D/Q68E | + | | ++++ |
| 267/268 | E48D/Q68E/R217K/ | + | | ++++ |
| | S333F/Q391A/S393V | | | |
| 269/270 | E48D/Q68E/S333F | + | | ++++ |
| 271/272 | E48D/R217K | + | + | ++++ |
| 273/274 | E48D/S333F | | | ++++ |
| 275/276 | E48D/S333G | + | + | ++++ |
| 277/278 | E48D/S393V | + | + | +++ |
| 279/280 | E48D/V345Q/S393V | | | +++ |
| 281/282 | Q68E | + | | +++ |
| 283/284 | Q68E/V345Q | ++ | ++ | ++++ |
| 285/286 | R217K/S333F | + | + | +++ |
| 287/288 | R217K/S333G | + | + | ++++ |
| 289/290 | S333F/V345Q | + | ++ | ++ |
| 291/292 | S333G | ++ | ++ | ++++ |
| 293/294 | D130E | | + | |
| 295/296 | D151L/A206S/D282N/ | ++ | + | |
| | P337R/K343D/V345Q/L398A | | | |
| 297/298 | D130E/V345Q/S393V | | + | |
| 299/300 | E39V/P337R/K343G/L398A | + | | |
| 301/302 | T47V/D151L | + | + | |
| 303/304 | T47V/D130E | + | + | |
| 305/306 | T47V/K343D/V345Q/S393V | + | + | |
| 307/308 | A206S/R217K | + | | |
| 309/310 | P337R/K343G/V345Q/L398A | + | | |
| 311/312 | D282N/S393V | + | | |
| 313/314 | K343D | + | + | |
| 315/316 | K343D/V345Q/S393V/L398A | + | | |
| 317/318 | E39V/T47V/R217K | + | | |
| 319/320 | A206S | + | | |
| 321/322 | S393V/L398A | + | | |
| 323/324 | E39V/D282N/P337R/L398A | + | + | |
| 325/326 | D151L | + | | |
| 327/328 | S393V | + | + | |
| 329/330 | R217K/P337R/V345Q/L398A | + | + | |
| 331/332 | D151L/D282N/S393V | + | | + |
| 333/334 | E39V/S393V/L398A | + | | + |
| 335/336 | L158R | | | + |
| 337/338 | D151L/L158R/R217K/ | + | ++ | + |
| | K343G/V345Q/S393V | | | |
| 339/340 | D130E/L158R | | + | + |
| 341/342 | D151L/S393V | | + | + |
| 343/344 | R217K | + | + | + |
| 345/346 | D130E/L158R/S393V | + | ++ | +++ |
| 347/348 | E39V/D151L | + | | +++ |
| 349/350 | D151L/V345Q/S393V/L398A | + | ++ | +++ |
| 351/352 | E39V/T47D | ++ | + | ++++ |
| 353/354 | L158R/S393V | ++ | + | ++++ |
| 355/356 | C59A/C143S | | | + |
| 357/358 | A271N | | ++ | |
| 359/360 | D202N | | | ++++ |
| 361/362 | D24S/D202N | + | | |
| 363/364 | S333N | + | | |
| 365/366 | C143S/S333N | + | | |
| 367/368 | C143S/A271N | ++ | | +++ |
| 369/370 | C143S/E387N | ++ | | ++ |

¹All activities were determined relative to the reference polypeptide of SEQ ID NO: 158. Levels of increased activity are defined as follows: “+” =0.9 to 1.1; “++” >1.1; “+++” >1.5; and “++++” >2.5.

### Example 8

### GLA Variants Derived from SEQ ID NO: 372

[0196] In this Example, experiments conducted to assess the activity, stability at pH 7.4, Gb3 clearance, and intracellular activity in Fabry fibroblasts of GLA variants are described. In this Example, the reference sequence was SEQ ID NO: 372 (i.e., the amino acid differences in the variants are indicated relative to SEQ ID NO: 372, and the assay results are reported relative to the results for SEQ ID NO: 372). These variants were tested for MU-Gal activity without pre-incubation (“unchallenged”) and after pH 7.4 pre-incubation as described in Example 5. Variants were also tested for MU-Gal activity in Fabry fibroblasts incubated with GLA variants as described in Example 5 (“Lysate FIOPC”). Variants were also tested for depletion of Gb3 in Fabry fibroblasts after incubation with GLA variants as described in Example 5 (“Gb3 FIOPC”).

TABLE 8-1
Relative performance of GLA Variants
(Relative to SEQ ID NO: 372)

| | Amino Acid | | Stability | | |
|---|---|---|---|---|---|
| | Differences | | After | | |
| | (Relative to | | pH 7.4 | | |
| SEQ ID NO: | SEQ ID NO: | Unchallenged | Preincubation | Lysate | Gb3 |
| (nt/aa) | 372) | FIOPC | FIOPC | FIOPC | FIOPC |
| 375/376 | F217R/N247D/L316D/M322I/ | + | ++++ | | |
| | A337P/W368A | | | | |
| 377/378 | H271A | + | | | + |
| 379/380 | H271A/L316D/M322I | +++ | ++ | | |
| 381/382 | H271A/Q302K/M322I | +++ | ++++ | ++ | |
| 383/384 | K206A/F217R/H271A/M392T | ++ | ++++ | +++ | + |
| 385/386 | L44R/K206A/A337P | +++ | +++ | ++++ | ++ |
| 387/388 | L44R/N247D/A261G/Q302K/ | ++ | | ++ | |
| | L316D | | | | |
| 389/390 | L44R/N247D/A261G/Q302K/ | ++ | + | + | |
| | L316D/M322I | | | | |
| 391/392 | L44R/S47T/K206A/F217R/ | + | ++++ | ++++ | |
| | N247D/H271A/M322I | | | | |
| 393/394 | L44R/S47T/N247D/M322I/ | +++ | ++++ | ++ | |
| | W368A | | | | |
| 395/396 | L44R/S47T/Q302K/L316D/ | +++ | ++++ | +++ | |
| | M3221 | | | | |
| 397/398 | L44R/S47T/Y92H/K206A/ | ++++ | ++++ | ++++ | |
| | F217R/L316D/M322I | | | | |
| 399/400 | L44R/S47T/Y92H/N247D/ | ++ | + | + | |
| | A261G/H271A/L316D/A337P/ | | | | |
| | W368A | | | | |
| 401/402 | L44R/Y92H/K206A/N247D/ | ++ | + | +++ | ++ |
| | W368A | | | | |
| 403/404 | L89I/F217R/N247D/A261G/ | ++ | + | | |
| | Q302K/L316D | | | | |
| 405/406 | M39E/L44R/Y92H/F217R/ | +++ | + | +++ | |
| | M322I | | | | |
| 407/408 | M39E/L44R/Y92H/N247D/ | ++ | | ++ | + |
| | H271A/Q302K | | | | |
| 409/410 | M39E/L44R/Y92H/R162M/ | ++ | + | ++ | |
| | N247D/Q302K/L316D/M322I | | | | |
| 411/412 | M39E/M322I | +++ | + | ++ | |
| 413/414 | M39E/N247D/H271A | + | + | + | + |
| 415/416 | M39E/N247D/H271A/L316D | +++ | +++ | | |
| 417/418 | M39E/S47T/F217R/N247D/ | ++++ | ++++ | | |
| | W368A | | | | |
| 419/420 | M39E/S47T/N247D | +++ | + | + | |
| 421/422 | M39E/S47T/Y92H/N247D/ | + | +++ | + | |
| | Q302K/L316D/M322I | | | | |
| 423/424 | M39E/Y92H/L316D/M322I | + | + | ++ | + |
| 425/426 | M39E/Y92H/N247D/Q302K/ | ++++ | ++++ | + | |
| | L316D/A337P/W368A | | | | |
| 427/428 | N247D | + | ++++ | + | |
| 433/434 | N247D/H271A | +++ | ++ | + | |
| 435/436 | N247D/Q302K | ++ | ++++ | ++ | + |
| 437/438 | Q302K/M322I/W368A | ++ | + | + | |
| 439/440 | S47T/F217R/Q302K | +++ | +++ | +++ | |
| 441/442 | S47T/N247D | ++ | ++++ | + | |
| 443/444 | S47T/N247D/H271A | +++ | ++++ | ++ | |
| 445/446 | S47T/Y92H/N247D/H271A | ++ | ++ | + | + |
| 447/448 | T10P | ++ | ++ | ++ | ++ |
| 449/450 | T10P/A261G | + | + | ++ | |
| 451/452 | T10P/A337P/M392T | ++ | ++ | + | ++ |
| 453/454 | T10P/H271A/Q302K | +++ | ++++ | ++ | + |
| 455/456 | T10P/K206A/A261G/H271A/ | + | + | ++ | |
| | L316D | | | | |
| 457/458 | T10P/K206A/F217R/H271A | ++ | ++++ | ++++ | |
| 459/460 | T10P/K206A/N247D | ++++ | ++++ | ++++ | |
| 461/462 | T10P/L316D/M322I | +++ | ++++ | ++ | + |
| 463/464 | T10P/L44R | +++ | + | +++ | ++ |
| 465/466 | T10P/L44R/A261G/Q302K/ | ++ | | ++ | + |
| | L316D | | | | |
| 467/468 | T10P/L44R/Q302K/A337P/ | ++++ | ++++ | ++++ | |
| | W368A | | | | |
| 469/470 | T10P/L44R/S47T/A261G/ | +++ | + | +++ | |
| | Q302K/M322I/W368A | | | | |
| 471/472 | T10P/L44R/S47T/Y92H/N247D | + | +++ | +++ | |
| 473/474 | T10P/L44R/Y92H/L316D/ | ++++ | +++ | +++ | |
| | M322I | | | | |
| 475/476 | T10P/M39E/L44R/M322I | +++ | | +++ | + |
| 477/478 | T10P/M39E/Y92H/K206A/ | ++ | +++ | +++ | |
| | F217R/H271A | | | | |
| 479/480 | T10P/M39E/Y92H/N247D | +++ | +++ | + | |
| 481/482 | T10P/M39E/Y92H/N247D/ | + | +++ | | |
| | H271A/L316D | | | | |
| 483/484 | T10P/Q302K | ++ | + | +++ | +++ |
| 485/486 | T10P/Q302K/L316D | ++ | +++ | ++ | + |
| 487/488 | T10P/Q302K/M322I/A337P | +++ | ++++ | +++ | ++ |
| 489/490 | T10P/S47T/F217R/M322I | + | +++ | ++ | + |
| 491/492 | T10P/S47T/F217R/N247D/ | +++ | ++++ | + | |
| | L316D/M392T | | | | |
| 493/494 | T10P/S47T/H271A | +++ | ++ | ++ | |
| 495/496 | T10P/W368A | +++ | ++ | + | |
| 497/498 | T10P/Y92H | + | + | ++ | |
| 499/500 | T10P/Y92H/F217R/A261G/ | ++ | + | ++ | |
| | Q302K/A337P | | | | |
| 501/502 | T10P/Y92H/K206A/F217R/ | + | ++++ | +++ | + |
| | N247D | | | | |
| 503/504 | T10P/Y92H/K206A/N247D/ | + | ++++ | ++ | |
| | L316D/M322I/M392T | | | | |
| 505/506 | T10P/Y92H/K206A/N247D/ | + | ++++ | +++ | ++ |
| | M322I/W368A | | | | |
| 507/508 | W368A | + | | + | |
| 509/510 | Y92H/F217R/H271A | ++ | + | + | |
| 511/512 | Y92H/H271A/A337P | ++ | + | + | |
| 513/514 | Y92H/L316D | +++ | + | | + |
| 515/516 | Y92H/N247D | +++ | ++ | ++ | |
| 517/518 | Y92H/N247D/H271A/M322I | ++ | ++ | + | + |
| 519/520 | Y92H/N247D/Q302K/M322I/ | + | +++ | + | |
| | A337P | | | | |
| 521/522 | Y92H/Q302K | ++ | | ++ | + |

¹All activities were determined relative to the reference polypeptide of SEQ ID NO: 372. Levels of increased activity are defined as follows: “+” =0.9 to 1.1; “++” >1.1; “+++” >1.5; and “++++” >2.

### Example 9

### GLA Variants Derived from SEQ ID NO: 374

[0197] In this Example, experiments conducted to determine GLA variant activity by assaying the enzyme activity after a series or independent challenges are described. These variants were tested for GLA MU-Gal activity after no pre-incubation and after pH 7.4 pre-incubation, as described in Example 5. Variants were also tested for MU-Gal activity after lysis of Fabry fibroblasts incubated with variants as described in Example 5. Variants were also tested for Gb3 depletion in Fabry fibroblasts after incubation, as described in Example 5.

TABLE 9-1
Relative Performance of GLA Variants Relative to SEQ ID NO: 374)¹

| | Amino Acid | | | | |
|---|---|---|---|---|---|
| | Differences | | | | |
| | (Relative to | | | | Gb3 |
| SEQ ID NO: | SEQ ID NO: | Unchallenged | Stability | Lysate | Depletion |
| (nt/aa) | 374) | FIOPC | FIOPC | FIOPC | FIOPC |
| 523/524 | P10T/E39M/R44L/T47S/P337A | + | | | |
| 525/526 | P10T/R44L/H92Y | ++ | | | |
| 527/528 | R44L/T47S/P166S | + | | | |
| 529/530 | A206K/R217F | ++ | | | |
| 531/532 | E39M/T47S/H92Y/T392M | | + | | |
| 533/534 | P10T/E39M/H92Y/W131G/ | + | | + | |
| | P166S/A271H/D316L/I322M | | | | |
| 535/536 | E39M/T47S/R217F/D247N/ | | | | + |
| | A368W | | | | |
| 537/538 | H92Y/P166S/D247N | | | | + |
| 539/540 | H92Y/R217F | | | | + |
| 541/542 | P10T/A206K | | | | ++ |
| 543/544 | P10T/D316L/T392M | | | | ++ |
| 545/546 | P10T/E39M/R44L/H92Y/P166S/ | | | | + |
| | G261A/D316L/I322M | | | | |
| 547/548 | P10T/E39M/R44L/H92Y/P166S/ | | | | + |
| | K302Q/I322M | | | | |
| 549/550 | P10T/E39M/R44L/H92Y/R217F/ | | | | + |
| | K302Q/I322M | | | | |
| 551/552 | P10T/E39M/R44L/T47S/D316L | | | | + |
| 553/554 | P10T/E39M/R44L/T47S/H92Y/ | | | | ++ |
| | A206K/R217F | | | | |
| 555/556 | P10T/H92 Y/K302Q/P337A | | | | + |
| 557/558 | P10T/R44L/H92Y/R217F/D247N/ | | | | + |
| | A271H/K302Q/D316L/T392M | | | | |
| 559/560 | P10T/R44L/T47S/P166S/A271H/ | | | | ++ |
| | I322M/A368W | | | | |
| 561/562 | P10T/R44L/T47S/R217F/A271H/ | | | | + |
| | D316L/I322M | | | | |
| 563/564 | R44L/T47S/H92Y/T392M | | | | + |
| 565/566 | T47S/A271H | | | | ++ |
| 567/568 | T47S/P166S/A206K/R217F/D247N/ | | | | + |
| | P337A | | | | |
| 569/570 | E39M/R44L/P166S/A271H/P337A/ | | | | + |
| | A368W/T392M | | | | |
| 571/572 | E39M/R44L/T47S/H92Y/P166S/ | | | | + |
| | A206K/T392M | | | | |
| 573/574 | H92Y/A206K/I322M | | | | + |
| 575/576 | P10T/E39M/R44L/H92Y/K302Q/ | | | | + |
| | I322M | | | | |
| 577/578 | P10T/E39M/R44L/T392M | | | | + |
| 579/580 | R44L/T47S | | | | + |
| 581/582 | D247N/D316L | | | | + |
| 583/584 | D316L/P337A/T392M | | | | + |
| 585/586 | D52N/R217F/K302Q/D316L | | | | + |
| 587/588 | H92Y/P166S/A206K/A271H/ | | | | + |
| | D316L | | | | |
| 589/590 | P10T/G261A/P337A/T392M | | | | + |
| 591/592 | P10T/K36M/H92Y/P166S/D247N/ | | | | ++ |
| | G261A/D316L/T392M | | | | |
| 593/594 | H92Y/R217F/A271H/P337A | | | | ++ |
| 595/596 | P10T/A368W | | | | + |
| 597/598 | P10T/E39M/H92Y/P166S/R217F/ | | | | + |
| | D247N/A271H | | | | |
| 599/600 | P10T/R44L/T47S/P166S/G261A/ | | | | + |
| | A271H | | | | |
| 601/602 | R44L/D316L/I322M/T392M | | | | ++ |
| 603/604 | E39M/R44L/T47S/A206K/P337A/ | + | | | ++ |
| | A368W/T392M | | | | |
| 605/606 | P10T/R44L/A206K/D316L/ | + | | | + |
| | I322M | | | | |
| 607/608 | E39M/R44L/P166S/A271H | ++ | | | ++ |
| 609/610 | E39M/T47S/D247N | ++ | | | + |
| 611/612 | P10T/A206K/D247N/G261A | +++ | | | ++ |
| 613/614 | P10T/E39M/R44L/H92Y/P166S/ | + | | | ++ |
| | T392M | | | | |
| 615/616 | P10T/R44L/P166S/K302Q | +++ | | | ++ |
| 617/618 | P10T/T47S/H92Y/A271H/K302Q | + | | | + |
| 619/620 | R44L/T47S/P166S/A271H | ++ | | | ++ |
| 621/622 | E39M/R44L/T47S/H92Y/A206K/ | +++ | +++ | | ++ |
| | D247N/G261A | | | | |
| 623/624 | E39M/R44L/T47S/H92Y/A206K/ | +++ | ++++ | | +++ |
| | T392M | | | | |
| 625/626 | P10T/E39M/T47S/H92Y/P337A | ++ | +++ | | + |
| 627/628 | P10T/H92Y/P166S/R217F/D247N/ | | | ++ | + |
| | G261A/A271H | | | | |
| 629/630 | P10T/T47S/P166S/D316L | | | + | ++ |
| 631/632 | P10T/T47S/H92Y/D316L/I322M/ | | | ++ | ++ |
| | T392M | | | | |
| 633/634 | R217F/T392M | | | ++ | + |
| 635/636 | E39M/P166S/R217F/G261A/ | | | +++ | +++ |
| | D316L/A368W | | | | |
| 637/638 | E39M/T47S/P166S/R217F/G261A/ | | | ++ | ++ |
| | T392M | | | | |
| 639/640 | P10T/E39M/H92Y/R217F/D316L | | | +++ | ++ |
| 641/642 | D316L/I322M/A368W | + | | +++ | ++ |
| 643/644 | H92Y/P166S/D316L | + | | +++ | +++ |
| 645/646 | H92Y/P166S/R217F/D316L/ | + | | +++ | +++ |
| | P337A/T392M | | | | |
| 647/648 | H92Y/P166S/R217F/G261A/ | +++ | | +++ | +++ |
| | A271H/T392M | | | | |
| 649/650 | P10T/H92Y/D316L/I322M | +++ | | ++++ | +++ |
| 651/652 | P10T/H92Y/P166S | + | | ++ | +++ |
| 653/654 | P10T/H92Y/P166S/P337A/A368W | + | | ++ | ++ |
| 655/656 | P10T/R217F/I322M | + | | +++ | +++ |
| 657/658 | P10T/T47S/H92Y/P166S/A271H/ | + | | +++ | ++ |
| | D316L/P337A | | | | |
| 659/660 | P10T/T47S/P166S/A271H | ++ | | ++ | ++ |
| 661/662 | P166S/D247N/A271H/D316L | + | | ++ | + |
| 663/664 | P166S/D316L/I322M/P337A | + | | + | + |
| 665/666 | P166S/R217F/D316L/I322M/ | + | | +++ | ++ |
| | P337A | | | | |
| 667/668 | R44L/T47S/D247N/A271H/ | +++ | | +++ | ++ |
| | T392M | | | | |
| 669/670 | T47S/A206K | +++ | | + | +++ |
| 671/672 | T47S/P166S/R217F/A271H/ | + | | + | +++ |
| | P337A | | | | |
| 673/674 | R44L/T47S/H92Y/R217F/ | ++ | | +++ | +++ |
| | A271H | | | | |
| 675/676 | H92Y/G261A/A271H | | +++ | ++ | ++ |
| 677/678 | P10T/E39M/R44L/P166S/G261A/ | | + | ++ | +++ |
| | A271H/D316L/I322M | | | | |
| 679/680 | P10T/H92Y/P166S/G261A/A271H/ | | +++ | + | +++ |
| | T392M | | | | |
| 681/682 | T47S/R217F/D247N/G261A | | + | +++ | + |
| 683/684 | E39M/H92Y/G261A/K302Q | +++ | ++++ | + | + |
| 685/686 | E39M/H92Y/P166S/R217F/ | +++ | +++ | +++ | ++ |
| | T392M | | | | |
| 687/688 | E39M/I322M | +++ | +++ | ++ | ++ |
| 689/690 | E39M/R44L/H92Y/P166S/D247N/ | +++ | ++++ | + | + |
| | G261A/K302Q/P337A | | | | |
| 691/692 | E39M/T392M | + | +++ | ++ | + |
| 693/694 | E39M/T47S/H92Y/D316L/ | + | +++ | + | + |
| | I322M | | | | |
| 695/696 | H92Y/A271H | +++ | ++++ | ++++ | +++ |
| 697/698 | P10T/E39M | +++ | +++ | ++++ | +++ |
| 699/700 | P10T/G261A | ++ | ++++ | +++ | ++ |
| 701/702 | P10T/H92Y/P166S/G261A/D316L/ | ++ | +++ | +++ | +++ |
| | I322M/P337A | | | | |
| 429/430 | R44L/P337A | + | + | + | +++ |
| 431/432 | R44L/T47S/H92Y/R217F/D316L/ | +++ | ++ | +++ | +++ |
| | I322M/T392M | | | | |

¹All activities were determined relative to the reference polypeptide of SEQ ID NO: 374. Levels of increased activity are defined as follows: “+” =0.75-0.9; “++” >0.9; “+++” >1.1; and “++++” >2.

### Example 10

### In vivo Characterization of GLA Variants

[0198] GLA variants were characterized in vivo for their activity towards accumulated Gb3. Fabry mice (5 month old females; Jackson, stock #3535) and age/sex matched wildtype mice with the identical genetic background were used. Mice were administered a single IV injection via tail vein with Codexis enzyme variants (1.0 mg/kg) Animals were sacrificed using CO₂ anesthesia at scheduled time points (1 and 2 weeks post-injection), and disease relevant tissues (e.g., heart and kidney) were dissected into two portions (one for enzyme activity assay, the other for Gb3 quantification), frozen on dry ice, and stored at −80° C. until analysis. For the enzyme assay, mouse tissues were homogenized in 20× volume (w/v) in Lysis Buffer (0.2% TRITON X-100™ non-ionic surfactant (Sigma #93443) diluted in 1×PBS) using motor-driven TEFLON® coated pestle in a glass homogenizer. Lysates were sonicated, centrifuged at 14,000 rpm for 15 min at 4° C., and the supernatants used for enzyme assay. α-Gal A activity was measured by the standard fluorometric assay using 5 mM 4-methylumbelliferyl-α-D-galactopyranoside at pH 4.4, in the presence of 0.1M N-acetylgalactosamine (i.e., a specific inhibitor of α-galactosidase B). Protein concentrations were measured using the BCA protein assay kit (Pierce, #23225). The activity was normalized to the protein concentration and expressed as nmol/mg protein/hour. Gb3 concentrations were measured by mass-spectrometry as previously described (See, Durant et al., J. Lipid Res., 52:1742-6 [2011]). Briefly, mouse tissues were homogenized in ice-cold 20× volume of ultra-pure water in a glass homogenizer, and the lysates corresponding to 200 μg total protein were subjected to glycosphingolipid extraction, saponification, and subsequent analysis of Gb₃ by mass-spectrometry. The Gb₃ concentration was be expressed as ng/mg protein. FIG. 5 provides a graph showing in vivo enzyme activity in the heart in the Fabry mouse model 1, 2 and 4 weeks post-treatment. FIG. 6. provides a graph of Gb3 degradation in heart tissue in Fabry mouse models 1 and 2 weeks post-treatment compared to untreated animals.

### Example 11

### GLA Variants Derived from SEQ ID NO: 704

[0199] In this Example, experiments conducted to assess activity, serum stability, intracellular activity in Fabry fibroblasts and Gb3 clearance by GLA variants in Fabry fibroblasts are described. In these experiments, the GLA variants were tested for MU-Gal activity without pre-incubation, after serum incubation, in lysates of Fabry fibroblasts relative to SEQ ID NO:704 (SEQ ID NO: 704 is the amino acid sequence from SEQ ID NO: 703 which is the mammalian codon optimized version of the yeast codon optimized SEQ ID NO: 275) as described in Example 5. Variants were also tested for Gb3 depletion in Fabry fibroblasts as described in Example 5.

TABLE 11-1
Relative Performance of GLA Variants (Relative to SEQ ID NO: 704)¹

| | Amino Acid | | | | |
|---|---|---|---|---|---|
| | Differences | | | | |
| | (Relative to | | | | Gb3 |
| SEQ ID NO: | SEQ ID NO: | Unchallenged | Stability | Lysate | Depletion |
| (nt/aa) | 704) | FIOPC | FIOPC | FIOPC | FIOPC |
| 705/706 | A254T/L398F | | | ++ | |
| 707/708 | A271N | + | + | | |
| 709/710 | A271N/F352N/Q391N | ++ | +++ | | |
| 711/712 | A271N/G333N | +++ | ++ | | |
| 713/714 | A271N/G333N/M390N/ | ++ | + | | |
| | Q391N | | | | |
| 715/716 | A271N/G333N/Q391N | ++ | + | | |
| 717/718 | A278N | | | ++ | + |
| 719/720 | A278R | ++ | ++ | | |
| 721/722 | A278S | +++ | +++ | ++ | ++ |
| 723/724 | A287R | + | + | +++ | |
| 725/726 | A339G | ++ | + | +++ | + |
| 727/728 | A339N | +++ | +++ | +++ | |
| 729/730 | A339Q | +++ | +++ | +++ | |
| 731/732 | A339V | ++ | + | ++ | ++ |
| 733/734 | C143S | +++ | +++ | +++ | ++ |
| 735/736 | C143S/A271N | ++ | +++ | + | |
| 737/738 | C143S/A271N/F352N/ | +++ | +++ | | |
| | M390N | | | | |
| 739/740 | C143S/D202N | ++ | +++ | + | + |
| 741/742 | C143S/E387N/Q391N | ++ | ++ | | |
| 743/744 | C143S/G333N | ++ | ++ | | |
| 745/746 | C143S/G333N/E387N/ | +++ | +++ | | + |
| | M390T | | | | |
| 747/748 | C59A | +++ | +++ | +++ | ++ |
| 749/750 | C59A/C143S | +++ | +++ | +++ | ++ |
| 751/752 | C59A/C143S/A271N | + | ++ | | |
| 753/754 | C59A/D202N | ++ | +++ | ++ | ++ |
| 755/756 | C59T | + | | | ++ |
| 757/758 | C59T/C143S/D202N | +++ | +++ | + | ++ |
| 759/760 | C59T/C143S/G333N | ++ | | | |
| 761/762 | C59T/D202N/G333N | ++ | | | + |
| 763/764 | C59V/A271N/E387N/ | +++ | | | |
| | M390T | | | | |
| 765/766 | C59V/C143S/D202N/ | ++ | | | |
| | A271N/G333N | | | | |
| 767/768 | D122E | ++ | +++ | + | |
| 769/770 | D122N | ++ | ++ | + | |
| 771/772 | D122S | + | | ++ | |
| 773/774 | D202N | + | ++ | | |
| 775/776 | D202N/G333N | + | | | ++ |
| 777/778 | D24S/A271N/F352N | ++ | | | |
| 779/780 | D24S/C143S/D144N | ++ | | | + |
| 781/782 | D24S/C143S/D202N/ | ++ | ++ | | |
| | F352N/M390N/Q391N | | | | |
| 783/784 | D24S/C143S/D202N/G333N | ++ | | | + |
| 785/786 | D24S/C143S/G333N/F35 | +++ | | | |
| | 2N/E387N/M390T/Q391N | | | | |
| 787/788 | D24S/C143S/M390T/Q391N | + | | | ++ |
| 789/790 | D24S/C59A | ++ | | | ++ |
| 791/792 | D24S/D202N | ++ | ++ | | ++ |
| 793/794 | D24S/D202N/A271N | ++ | ++ | | |
| 795/796 | D24S/D202N/G333N/ | + | | | |
| | F352N | | | | |
| 797/798 | D24S/E387N/Q391N | ++ | + | | |
| 799/800 | D24S/F352N/E387N/ | +++ | ++ | | |
| | M390N/Q391N | | | | |
| 801/802 | D284A | ++ | ++ | +++ | |
| 803/804 | D284E | +++ | +++ | +++ | |
| 805/806 | D284G | + | | +++ | + |
| 807/808 | D284L | | | +++ | + |
| 809/810 | D284M | ++ | ++ | +++ | |
| 811/812 | D284R | ++ | + | +++ | |
| 813/814 | D284S | ++ | ++ | ++++ | |
| 815/816 | D2S | ++ | | | +++ |
| 817/818 | D304T | ++ | ++ | | +++ |
| 819/820 | D304V | + | | | +++ |
| 821/822 | D304W | | | ++ | +++ |
| 823/824 | E147L | ++ | | | |
| 825/826 | E147S | ++ | ++ | | |
| 827/828 | E367A | +++ | +++ | | |
| 829/830 | E367D | ++ | ++ | + | + |
| 831/832 | E367L | ++ | +++ | +++ | + |
| 833/834 | E367M | ++ | + | +++ | |
| 835/836 | E387N/Q391N | +++ | +++ | | |
| 837/838 | E40Q | + | | ++ | |
| 839/840 | G164E | ++ | | | |
| 841/842 | G303A | ++ | ++ | + | |
| 843/844 | G303C | ++ | + | ++ | |
| 845/846 | G303W | +++ | +++ | +++ | |
| 847/848 | G333N/F352N | ++ | | | |
| 849/850 | G333N/M390N/Q391N | +++ | +++ | | |
| 851/852 | G333N/M390S/Q391N | +++ | + | | |
| 853/854 | G333N/Q391N | +++ | ++ | | + |
| 855/856 | G4L | + | | | ++ |
| 857/858 | G73A | | | | ++ |
| 859/860 | H155A | +++ | +++ | + | |
| 861/862 | H155D | +++ | +++ | | |
| 863/864 | H155F | +++ | ++ | +++ | +++ |
| 865/866 | H155L | ++ | | | +++ |
| 867/868 | H155R | ++ | +++ | | |
| 869/870 | H155T | ++ | +++ | + | |
| 871/872 | H375L | ++ | ++ | | ++ |
| 873/874 | H375Q | ++ | +++ | | |
| 875/876 | H84G | ++ | ++ | + | ++ |
| 877/878 | H84K | +++ | +++ | +++ | +++ |
| 879/880 | H84R | + | | +++ | |
| 881/882 | I123Q | ++ | +++ | ++ | |
| 883/884 | I123R | ++ | + | +++ | |
| 885/886 | I123S | + | | ++ | + |
| 887/888 | I123T | ++ | ++ | ++ | |
| 889/890 | I336F | ++ | ++ | ++ | |
| 891/892 | I336G | | | | ++ |
| 893/894 | I336S | | | + | ++ |
| 895/896 | I336T | ++ | ++ | ++ | ++ |
| 897/898 | K277Q | | | | +++ |
| 899/900 | K277V | | | ++ | +++ |
| 901/902 | K283L | ++ | + | +++ | |
| 903/904 | K283P | ++ | +++ | +++ | |
| 905/906 | K283T | + | + | +++ | ++ |
| 907/908 | K283V | + | + | +++ | |
| 909/910 | K343L | ++ | ++ | ++ | ++ |
| 911/912 | K343R | +++ | +++ | +++ | |
| 913/914 | K343S | ++ | ++ | + | |
| 915/916 | K343W | | | ++ | |
| 917/918 | K360H | ++ | ++ | + | + |
| 919/920 | K360V | | | | ++ |
| 921/922 | K362H | ++ | +++ | | |
| 923/924 | L280G | | | | ++ |
| 925/926 | L300F | ++ | + | +++ | |
| 927/928 | L341F | ++ | + | ++ | ++ |
| 929/930 | L341M | ++ | ++ | ++ | |
| 931/932 | L398F | ++ | ++ | +++ | |
| 933/934 | L5M | + | ++ | | |
| 935/936 | L5V | +++ | +++ | ++ | |
| 937/938 | M390S | ++ | ++ | | |
| 939/940 | N218Y | ++ | + | +++ | |
| 941/942 | N218Y/L398F | +++ | + | +++ | |
| 943/944 | N218Y/R361T | ++ | | +++ | |
| 945/946 | N218Y/R361T/L398F | ++ | + | +++ | |
| 947/948 | N377Q | ++ | | | |
| 949/950 | N91S/T215S/R361T | ++ | | ++ | |
| 951/952 | P179H | +++ | +++ | | +++ |
| 953/954 | P179L | | | | ++ |
| 955/956 | P179R | +++ | +++ | | |
| 957/958 | P179W | ++ | | | |
| 959/960 | P331M | ++ | + | | |
| 961/962 | P83R | | | | +++ |
| 963/964 | P83S | | | | +++ |
| 965/966 | Q275A | +++ | +++ | +++ | +++ |
| 967/968 | Q275G | + | ++ | ++ | |
| 969/970 | Q281I | | | | ++ |
| 971/972 | Q281M | | | | ++ |
| 973/974 | Q385R | + | + | +++ | |
| 975/976 | Q76A | + | | ++ | |
| 977/978 | Q76F | + | | +++ | |
| 979/980 | Q76M | ++ | +++ | ++ | |
| 981/982 | Q76S | | | +++ | |
| 983/984 | Q80T | ++ | +++ | ++ | |
| 985/986 | R165I | ++ | | | |
| 987/988 | R325A | ++ | | | |
| 989/990 | R332G | ++ | | | |
| 991/992 | R332H | +++ | | | |
| 993/994 | R361T | ++ | ++ | +++ | |
| 995/996 | R361V | ++ | +++ | +++ | +++ |
| 997/998 | R371G | +++ | +++ | +++ | |
| 999/1000 | R373L | +++ | +++ | + | |
| 1001/1002 | R373S | +++ | ++ | ++ | |
| 1003/1004 | S210I | | | | +++ |
| 1005/1006 | S273L | + | | +++ | |
| 1007/1008 | S31F | ++ | + | ++ | |
| 1009/1010 | S31H | ++ | +++ | + | ++ |
| 1011/1012 | S31L | ++ | +++ | +++ | |
| 1013/1014 | S31T | ++ | ++ | +++ | |
| 1015/1016 | S31W | | | | ++ |
| 1017/1018 | S340H | +++ | +++ | ++ | ++ |
| 1019/1020 | S340I | +++ | +++ | +++ | |
| 1021/1022 | S340K | +++ | +++ | +++ | +++ |
| 1023/1024 | S340M | +++ | +++ | +++ | |
| 1025/1026 | S340P | ++ | ++ | +++ | |
| 1027/1028 | S340W | ++ | ++ | +++ | |
| 1029/1030 | T186E | ++ | ++ | | |
| 1031/1032 | T186F | ++ | ++ | | |
| 1033/1034 | T186M | +++ | ++ | | |
| 1035/1036 | T186P | ++ | | | |
| 1037/1038 | T186R | ++ | + | | |
| 1039/1040 | T186S | +++ | ++ | | |
| 1041/1042 | T186Y | ++ | +++ | | |
| 1043/1044 | T215S/N218Y | ++ | + | +++ | |
| 1045/1046 | T335A | + | + | ++ | ++ |
| 1047/1048 | T335L | ++ | + | ++ | |
| 1049/1050 | T369D | +++ | +++ | +++ | |
| 1051/1052 | V338L | ++ | ++ | ++ | |
| 1053/1054 | V359F | ++ | ++ | ++ | |
| 1055/1056 | V359L | +++ | +++ | ++ | |
| 1057/1058 | V359R | ++ | ++ | ++ | |
| 1059/1060 | V382I | | | +++ | |
| 1061/1062 | V382I/L398F | ++ | ++ | +++ | |
| 1063/1064 | W246Y | ++ | ++ | ++ | ++ |
| 1065/1066 | Y334C | ++ | ++ | +++ | ++ |
| 1067/1068 | Y334V | +++ | +++ | +++ | + |

¹All activities were determined relative to the reference polypeptide of SEQ ID NO: 704. Levels of increased activity are defined as follows: “+” =0.75-0.9; “++” >0.9; “+++” >1.1; and “++++” >2.

### Example 12

### GLA Variants Derived from SEQ ID NO: 374

[0200] In this Example, experiments conducted to assess activity, serum stability, intracellular activity in Fabry fibroblasts and Gb3 clearance by GLA variants in Fabry fibroblasts are described. In these experiments, the GLA variants were tested for MU-Gal activity without pre-incubation, after serum incubation, in lysates of Fabry fibroblasts as described in Example 5. Variants were also tested for Gb3 depletion in Fabry fibroblasts as described in Example 5.

TABLE 12-1
Relative Performance of GLA Variants
(Relative to SEQ ID NO: 374)¹

| | Amino Acid | | | | |
|---|---|---|---|---|---|
| | Differences | | | | |
| | (Relative to | Unchal- | | | Gb3 |
| SEQ ID NO: | SEQ ID NO: | lenged | Stability | Lysate | Depletion |
| (nt/aa) | 374) | FIOPC | FIOPC | FIOPC | FIOPC |
| 1069/1070 | A206C | + | + | + | +++ |
| 1071/1072 | A206D | + | + | + | + |
| 1073/1074 | A206E | +++ | +++ | ++ | +++ |
| 1075/1076 | A206F | ++ | ++ | + | +++ |
| 1077/1078 | A206G | +++ | ++ | + | ++ |
| 1079/1080 | A206H | +++ | +++ | ++ | ++ |
| 1081/1082 | A206I | ++ | +++ | +++ | ++++ |
| 1083/1084 | A206K | ++ | ++ | + | ++++ |
| 1085/1086 | A206L | ++ | ++ | + | ++ |
| 1087/1088 | A206M | ++ | +++++ | +++ | +++ |
| 1089/1090 | A206N | ++ | ++ | ++ | + |
| 1091/1092 | A206P | + | + | − | +++ |
| 1093/1094 | A206Q | ++ | ++ | +++ | ++++ |
| 1095/1096 | A206R | ++ | +++ | +++ | + |
| 1097/1098 | A206S | − | − | − | + |
| 1099/1100 | A206T | +++ | +++ | +++ | ++ |
| 1101/1102 | A206V | ++ | +++ | +++ | +++ |
| 1103/1104 | A206W | + | + | + | +++ |
| 1105/1106 | A206Y | ++ | ++ | ++ | ++++ |
| 1107/1108 | A271C | + | + | + | + |
| 1109/1110 | A271D | ++ | ++ | + | ++ |
| 1111/1112 | A271E | +++ | ++++ | ++ | + |
| 1113/1114 | A271F | + | + | + | + |
| 1115/1116 | A271G | ++ | + | ++ | + |
| 1117/1118 | A271H | + | + | + | + |
| 1119/1120 | A271I | + | + | + | ++++ |
| 1121/1122 | A271K | +++ | ++++ | ++++ | + |
| 1123/1124 | A271L | + | + | ++ | + |
| 1125/1126 | A271M | + | + | + | + |
| 1127/1128 | A271N | ++++ | ++++ | ++ | + |
| 1129/1130 | A271P | + | + | − | ++++ |
| 1131/1132 | A271Q | + | + | + | + |
| 1133/1134 | A271R | +++ | ++++ | ++++ | + |
| 1135/1136 | A271S | ++++ | +++++ | + | + |
| 1137/1138 | A271T | ++ | ++++ | + | − |
| 1139/1140 | A271V | +++ | ++ | ++ | + |
| 1141/1142 | A271W | + | + | ++++ | ++ |
| 1143/1144 | A271Y | + | − | − | − |
| 1145/1146 | A368C | +++ | ++++ | +++ | + |
| 1147/1148 | A368D | +++ | ++++ | ++++ | + |
| 1149/1150 | A368E | +++ | +++ | ++ | +++ |
| 1151/1152 | A368F | +++ | ++ | ++ | + |
| 1153/1154 | A368G | + | ++++ | + | − |
| 1155/1156 | A368H | +++ | ++ | +++ | + |
| 1157/1158 | A368I | ++ | +++ | +++ | + |
| 1159/1160 | A368K | + | + | + | + |
| 1161/1162 | A368L | ++ | + | + | + |
| 1163/1164 | A368M | ++++ | ++++ | +++ | + |
| 1165/1166 | A368N | +++ | +++ | ++ | + |
| 1167/1168 | A368P | ++ | +++ | +++ | + |
| 1169/1170 | A368Q | + | ++ | +++ | ++ |
| 1171/1172 | A368R | ++ | ++ | ++ | + |
| 1173/1174 | A368S | ++ | ++ | + | + |
| 1175/1176 | A368T | +++ | + | + | + |
| 1177/1178 | A368V | + | + | + | + |
| 1179/1180 | A368W | ++ | +++ | +++ | + |
| 1181/1182 | A368Y | +++ | +++ | ++++ | + |
| 1183/1184 | D247A | + | ++ | + | + |
| 1185/1186 | D247C | + | + | + | − |
| 1187/1188 | D247E | + | + | ++ | + |
| 1189/1190 | D247F | + | − | + | + |
| 1191/1192 | D247G | + | ++++ | + | ++ |
| 1193/1194 | D247H | + | ++++ | + | +++ |
| 1195/1196 | D247I | + | − | + | + |
| 1197/1198 | D247K | − | − | + | − |
| 1199/1200 | D247L | + | + | + | + |
| 1201/1202 | D247M | + | + | +++ | + |
| 1203/1204 | D247N | ++ | ++ | + | ++ |
| 1205/1206 | D247P | + | + | + | ++ |
| 1207/1208 | D247Q | + | + | + | + |
| 1209/1210 | D247R | + | − | + | − |
| 1211/1212 | D247S | ++ | +++ | + | + |
| 1213/1214 | D247T | + | + | ++ | ++ |
| 1215/1216 | D247V | + | − | + | − |
| 1217/1218 | D247W | + | +++ | + | + |
| 1219/1220 | D247Y | + | + | + | + |
| 1221/1222 | D316A | + | + | +++ | + |
| 1223/1224 | D316C | + | + | + | +++ |
| 1225/1226 | D316E | ++ | + | ++ | ++ |
| 1227/1228 | D316F | + | + | ++ | + |
| 1229/1230 | D316G | +++ | ++++ | ++ | + |
| 1231/1232 | D316H | +++ | +++++ | ++++ | +++ |
| 1233/1234 | D316I | ++ | + | +++ | + |
| 1235/1236 | D316K | ++ | ++ | +++ | + |
| 1237/1238 | D316L | ++ | +++++ | ++ | + |
| 1239/1240 | D316M | + | + | ++ | ++ |
| 1241/1242 | D316N | +++ | +++ | +++ | ++ |
| 1243/1244 | D316P | + | + | + | + |
| 1245/1246 | D316Q | + | + | + | + |
| 1247/1248 | D316R | ++ | +++ | +++ | + |
| 1249/1250 | D316S | ++ | +++ | +++ | + |
| 1251/1252 | D316T | + | +++ | ++++ | + |
| 1253/1254 | D316V | + | + | ++ | + |
| 1255/1256 | D316W | + | + | ++ | + |
| 1257/1258 | D316Y | ++ | +++ | +++ | + |
| 1259/1260 | E39A | + | + | +++ | + |
| 1261/1262 | E39C | + | + | + | ++ |
| 1263/1264 | E39D | − | − | − | − |
| 1265/1266 | E39F | + | + | + | ++++ |
| 1267/1268 | E39G | − | − | − | + |
| 1269/1270 | E39H | ++ | ++ | ++ | +++ |
| 1271/1272 | E39I | + | + | ++ | + |
| 1273/1274 | E39K | ++ | ++ | ++++ | +++ |
| 1275/1276 | E39L | ++ | +++ | +++ | ++++ |
| 1277/1278 | E39M | ++ | +++ | + | +++ |
| 1279/1280 | E39N | + | + | + | +++ |
| 1281/1282 | E39P | − | − | + | + |
| 1283/1284 | E39Q | + | + | ++ | ++++ |
| 1285/1286 | E39R | − | − | − | + |
| 1287/1288 | E39S | + | + | + | +++ |
| 1289/1290 | E39T | + | + | ++ | ++++ |
| 1291/1292 | E39V | ++ | ++ | + | ++++ |
| 1293/1294 | E39W | + | + | +++ | +++ |
| 1295/1296 | E39Y | ++ | +++ | ++ | + |
| 1297/1298 | G261A | ++++ | ++++ | +++++ | + |
| 1299/1300 | G261C | ++ | + | + | + |
| 1301/1302 | G261D | − | − | − | − |
| 1303/1304 | G261E | − | + | − | + |
| 1305/1306 | G261F | − | − | + | + |
| 1307/1308 | G261H | − | − | + | − |
| 1309/1310 | G261I | − | − | + | − |
| 1311/1312 | G261K | − | − | − | − |
| 1313/1314 | G261L | − | − | + | − |
| 1315/1316 | G261M | − | − | + | − |
| 1317/1318 | G261N | − | − | − | − |
| 1319/1320 | G261P | + | − | + | + |
| 1321/1322 | G261Q | − | − | + | − |
| 1323/1324 | G261R | − | + | − | − |
| 1325/1326 | G261S | ++++ | ++++ | ++++ | + |
| 1327/1328 | G261T | ++ | − | + | − |
| 1329/1330 | G261V | + | − | + | + |
| 1331/1332 | G261W | − | − | + | − |
| 1333/1334 | G261Y | − | − | − | + |
| 1335/1336 | H92A | + | + | +++ | + |
| 1337/1338 | H92C | + | + | + | + |
| 1339/1340 | H92D | + | + | + | + |
| 1341/1342 | H92E | + | + | +++ | ++ |
| 1343/1344 | H92F | +++ | +++ | +++ | + |
| 1345/1346 | H92G | + | + | + | + |
| 1347/1348 | H92I | ++ | + | + | + |
| 1349/1350 | H92K | +++ | +++ | +++ | + |
| 1351/1352 | H92L | ++ | +++ | +++ | + |
| 1353/1354 | H92M | + | + | + | + |
| 1355/1356 | H92N | + | + | + | ++ |
| 1357/1358 | H92P | − | − | − | − |
| 1359/1360 | H92Q | ++ | ++ | ++ | ++++ |
| 1361/1362 | H92R | ++ | ++ | + | +++ |
| 1363/1364 | H92S | ++ | +++ | +++ | + |
| 1365/1366 | H92T | ++++ | +++++ | ++++ | + |
| 1367/1368 | H92V | +++ | +++++ | +++ | ++++ |
| 1369/1370 | H92W | ++ | ++ | ++ | +++ |
| 1371/1372 | H92Y | ++ | ++ | +++ | ++ |
| 1373/1374 | I322A | + | + | + | + |
| 1375/1376 | I322C | + | + | + | + |
| 1377/1378 | I322D | − | − | − | + |
| 1379/1380 | I322E | + | + | + | + |
| 1381/1382 | I322F | + | + | ++ | + |
| 1383/1384 | I322G | + | − | + | − |
| 1385/1386 | I322H | − | − | + | − |
| 1387/1388 | I322K | + | + | + | − |
| 1389/1390 | I322L | + | ++ | ++ | + |
| 1391/1392 | I322M | + | +++ | ++++ | + |
| 1393/1394 | I322N | − | + | + | − |
| 1395/1396 | I322P | − | − | + | + |
| 1397/1398 | I322Q | + | + | + | + |
| 1399/1400 | I322R | − | − | + | − |
| 1401/1402 | I322S | + | − | + | ++ |
| 1403/1404 | I322T | + | + | + | ++ |
| 1405/1406 | I322V | + | + | + | + |
| 1407/1408 | I322W | + | + | + | − |
| 1409/1410 | I322Y | + | + | + | − |
| 1411/1412 | K302A | + | + | + | + |
| 1413/1414 | K302C | +++ | +++ | +++ | + |
| 1415/1416 | K302D | + | + | + | + |
| 1417/1418 | K302E | + | + | + | + |
| 1419/1420 | K302F | ++ | +++ | +++ | + |
| 1421/1422 | K302G | +++ | ++++ | ++ | + |
| 1423/1424 | K302H | ++++ | ++++ | ++++ | + |
| 1425/1426 | K302I | + | + | ++ | + |
| 1427/1428 | K302L | +++ | +++++ | ++++ | ++++ |
| 1429/1430 | K302M | ++ | ++++ | +++ | + |
| 1431/1432 | K302N | + | + | + | + |
| 1433/1434 | K302P | + | + | + | + |
| 1435/1436 | K302Q | ++ | + | ++ | ++ |
| 1437/1438 | K302R | + | + | ++ | + |
| 1439/1440 | K302S | ++ | + | + | + |
| 1441/1442 | K302T | +++ | ++++ | ++++ | ++ |
| 1443/1444 | K302V | ++ | +++ | ++ | + |
| 1445/1446 | K302W | + | +++++ | +++ | + |
| 1447/1448 | K302Y | +++ | +++ | ++++ | + |
| 1449/1450 | P10A | ++ | + | + | ++ |
| 1451/1452 | P10C | + | ++ | + | − |
| 1453/1454 | P10D | + | − | + | + |
| 1455/1456 | P10E | + | − | + | + |
| 1457/1458 | P10F | − | + | − | − |
| 1459/1460 | P10G | +++ | ++++ | +++ | +++ |
| 1461/1462 | P10H | + | − | + | + |
| 1463/1464 | P10I | + | + | + | ++++ |
| 1465/1466 | P10K | + | − | + | + |
| 1467/1468 | P10L | − | − | − | − |
| 1469/1470 | P10M | ++ | − | + | +++ |
| 1471/1472 | PION | + | − | + | + |
| 1473/1474 | P10Q | + | + | + | +++ |
| 1475/1476 | P10R | + | + | + | ++++ |
| 1477/1478 | P10S | + | + | + | +++ |
| 1479/1480 | P10T | + | ++ | ++ | + |
| 1481/1482 | P10V | + | + | + | + |
| 1483/1484 | P10W | − | − | − | − |
| 1485/1486 | P10Y | − | − | − | ++ |
| 1487/1488 | P166A | ++ | + | ++ | + |
| 1489/1490 | P166C | + | − | + | + |
| 1491/1492 | P166D | ++++ | ++++ | +++ | + |
| 1493/1494 | P166E | ++ | ++ | + | ++ |
| 1495/1496 | P166F | + | + | + | + |
| 1497/1498 | P166G | − | − | − | − |
| 1499/1500 | P166H | + | + | ++ | + |
| 1501/1502 | P166I | + | − | + | + |
| 1503/1504 | P166K | ++ | + | + | ++ |
| 1505/1506 | P166L | + | + | + | ++++ |
| 1507/1508 | P166M | + | + | + | + |
| 1509/1510 | P166N | + | + | + | ++++ |
| 1511/1512 | P166Q | − | − | − | − |
| 1513/1514 | P166R | + | + | ++ | +++ |
| 1515/1516 | P166S | + | + | + | +++ |
| 1517/1518 | P166T | + | + | + | +++ |
| 1519/1520 | P166V | − | − | − | − |
| 1521/1522 | P166W | − | − | − | + |
| 1523/1524 | P166Y | ++ | + | ++ | + |
| 1525/1526 | P337A | + | + | + | + |
| 1527/1528 | P337C | + | + | + | +++ |
| 1529/1530 | P337D | ++ | ++++ | ++ | − |
| 1531/1532 | P337E | + | + | + | − |
| 1533/1534 | P337F | ++ | +++++ | ++++ | ++++ |
| 1535/1536 | P337G | + | + | + | + |
| 1537/1538 | P337H | ++ | +++ | + | ++ |
| 1539/1540 | P337I | ++ | + | ++++ | + |
| 1541/1542 | P337K | + | ++ | ++ | + |
| 1543/1544 | P337L | ++ | + | ++ | + |
| 1545/1546 | P337M | + | + | + | +++ |
| 1547/1548 | P337N | ++ | ++ | + | + |
| 1549/1550 | P337Q | + | ++ | + | + |
| 1551/1552 | P337R | ++ | +++ | +++ | + |
| 1553/1554 | P337S | +++ | +++++ | ++++ | + |
| 1555/1556 | P337T | + | ++ | ++ | + |
| 1557/1558 | P337V | + | + | + | + |
| 1559/1560 | P337W | + | + | +++++ | ++ |
| 1561/1562 | P337Y | +++ | + | +++ | − |
| 1563/1564 | R217A | ++ | +++ | ++ | + |
| 1565/1566 | R217C | + | + | + | ++++ |
| 1567/1568 | R217D | + | ++ | + | ++++ |
| 1569/1570 | R217E | +++ | +++ | +++ | + |
| 1571/1572 | R217F | ++ | + | +++ | +++ |
| 1573/1574 | R217G | +++ | +++ | +++ | + |
| 1575/1576 | R217H | ++ | ++ | + | +++ |
| 1577/1578 | R217I | +++ | +++ | +++ | +++ |
| 1579/1580 | R217K | ++ | ++ | + | ++++ |
| 1581/1582 | R217L | + | + | + | ++ |
| 1583/1584 | R217M | + | + | + | ++ |
| 1585/1586 | R217N | +++ | +++ | ++ | +++ |
| 1587/1588 | R217P | ++ | + | + | +++ |
| 1589/1590 | R217Q | ++ | ++ | ++ | + |
| 1591/1592 | R217S | +++ | +++ | +++ | +++ |
| 1593/1594 | R217T | + | − | + | +++ |
| 1595/1596 | R217V | ++ | ++ | + | ++ |
| 1597/1598 | R217W | +++ | + | ++++ | ++ |
| 1599/1600 | R217Y | + | + | ++ | + |
| 1601/1602 | R44A | ++ | + | + | + |
| 1603/1604 | R44C | ++ | +++ | + | + |
| 1605/1606 | R44D | + | − | + | + |
| 1607/1608 | R44E | ++ | + | + | + |
| 1609/1610 | R44F | +++ | +++ | ++ | + |
| 1611/1612 | R44G | + | + | + | + |
| 1613/1614 | R44H | + | + | + | ++ |
| 1615/1616 | R44I | +++ | +++ | + | ++ |
| 1617/1618 | R44K | +++ | +++ | ++ | + |
| 1619/1620 | R44L | + | + | + | +++ |
| 1621/1622 | R44N | + | ++ | ++ | + |
| 1623/1624 | R44P | − | − | + | + |
| 1625/1626 | R44Q | +++ | ++++ | +++ | + |
| 1627/1628 | R44S | ++ | ++ | ++ | ++++ |
| 1629/1630 | R44T | + | + | + | ++++ |
| 1631/1632 | R44V | +++ | +++ | ++++ | + |
| 1633/1634 | R44W | + | + | + | + |
| 1635/1636 | R44Y | + | + | + | ++++ |
| 1637/1638 | T392A | ++ | ++ | ++ | ++++ |
| 1639/1640 | T392C | + | + | + | +++ |
| 1641/1642 | T392D | +++ | ++++ | +++ | ++ |
| 1643/1644 | T392E | +++ | +++++ | ++++ | ++++ |
| 1645/1646 | T392F | + | + | + | ++ |
| 1647/1648 | T392G | + | ++ | + | ++ |
| 1649/1650 | T392H | ++ | +++ | ++ | + |
| 1651/1652 | T392I | + | + | +++ | + |
| 1653/1654 | T392K | ++ | +++ | + | +++ |
| 1655/1656 | T392L | ++ | ++ | + | +++ |
| 1657/1658 | T392M | + | ++ | + | +++ |
| 1659/1660 | T392N | ++ | +++ | ++++ | + |
| 1661/1662 | T392P | +++ | +++ | ++ | +++ |
| 1663/1664 | T392Q | ++ | + | + | +++ |
| 1665/1666 | T392R | ++ | +++ | + | ++ |
| 1667/1668 | T392S | ++ | +++ | +++ | ++++ |
| 1669/1670 | T392V | ++ | +++ | ++ | ++ |
| 1671/1672 | T392W | + | + | +++ | ++++ |
| 1673/1674 | T392Y | + | + | + | + |
| 1675/1676 | T47A | ++ | +++ | +++ | + |
| 1677/1678 | T47C | + | + | + | − |
| 1679/1680 | T47D | + | + | + | + |
| 1681/1682 | T47E | + | + | + | +++ |
| 1683/1684 | T47F | + | + | + | +++ |
| 1685/1686 | T47G | + | + | + | +++ |
| 1687/1688 | T47H | ++ | + | +++ | + |
| 1689/1690 | T47I | ++ | + | ++ | ++ |
| 1691/1692 | T47K | + | ++ | +++ | + |
| 1693/1694 | T47L | + | + | + | + |
| 1695/1696 | T47M | + | + | +++ | + |
| 1697/1698 | T47N | ++ | ++ | ++ | +++ |
| 1699/1700 | T47P | − | − | − | ++ |
| 1701/1702 | T47Q | + | + | + | ++++ |
| 1703/1704 | T47R | +++ | ++++ | ++++ | + |
| 1705/1706 | T47S | + | + | + | ++ |
| 1707/1708 | T47V | ++ | +++ | ++++ | + |
| 1709/1710 | T47W | + | + | + | + |
| 1711/1712 | T47Y | + | + | ++ | +++ |

¹All activities were determined relative to the reference polypeptide of SEQ ID NO: 374. Levels of increased activity are defined as follows: “−” <0.1; “+” 0.1-0.9; “++” >0.9; “+++” >1.1; “++++” >1.5; and “+++++” >2.5.

### Example 13

### GLA Variants Derived from SEQ ID NO: 1022

[0201] In this Example, experiments conducted to assess activity, serum stability and intracellular activity in Fabry fibroblasts are described. In these experiments, the GLA variants were tested for MU-Gal activity without pre-incubation, after serum incubation, in lysates of Fabry fibroblasts as described in Example 5.

TABLE 13-1
Relative Performance of GLA Variants
(Relative to SEQ ID NO: 1022)¹

| | Amino Acid | | | |
|---|---|---|---|---|
| | Differences | | | |
| | (Relative to | | | |
| SEQ ID NO: | SEQ ID NO: | Unchallenged | Stability | Lysate |
| (nt/aa) | 1022) | FIOPC | FIOPC | FIOPC |
| 1713/1714 | D284S | +++ | +++ | ++++ |
| 1715/1716 | H92T/A368E | +++ | ++++ | ++++ |
| 1717/1718 | K283T | +++ | +++ | ++++ |
| 1719/1720 | K283T/D284E | ++ | + | ++++ |
| 1721/1722 | D284M | + | ++ | +++ |
| 1723/1724 | H92T | +++ | +++ | +++ |
| 1725/1726 | H92Q | +++ | +++ | +++ |
| 1727/1728 | S31T/T47R | ++ | + | +++ |
| 1729/1730 | E39V/R44V/T47R/ | + | + | +++ |
| | G261S/K283L/D284A | | | |
| 1731/1732 | E39L/D284S | ++ | +++ | +++ |
| 1733/1734 | A206I | +++ | +++ | +++ |
| 1735/1736 | E39V/R44V/K283T | +++ | +++ | +++ |
| 1737/1738 | H92V/Q275A/D284S | + | + | +++ |
| 1739/1740 | H92T/K283P | +++ | +++ | +++ |
| 1741/1742 | H92T/D284M | ++ | + | +++ |
| 1743/1744 | H155F | +++ | ++ | +++ |
| 1745/1746 | K302L | +++ | +++ | +++ |
| 1747/1748 | G261S | +++ | +++ | +++ |
| 1749/1750 | A271K/A368E | +++ | +++ | +++ |
| 1751/1752 | H84K/H92V | +++ | +++ | +++ |
| 1753/1754 | H92T/A271K | +++ | +++ | +++ |
| 1755/1756 | H92V/A206E/D284S | +++ | +++ | +++ |
| 1757/1758 | G261S/K283L | + | + | +++ |
| 1759/1760 | S31T | + | + | +++ |
| 1761/1762 | H84K/D284S/K302L/ | ++ | ++ | +++ |
| | T392A | | | |
| 1763/1764 | E39V/R44V/T47R | +++ | ++ | +++ |
| 1765/1766 | H84K/A368E/T392A | ++ | +++ | +++ |
| 1767/1768 | D316H | +++ | +++ | +++ |
| 1769/1770 | S31T/K283L/D284A | | | +++ |
| 1771/1772 | A271K | ++ | +++ | +++ |
| 1773/1774 | A368E/T392W | +++ | +++ | +++ |
| 1775/1776 | R44V | +++ | ++ | +++ |
| 1777/1778 | A206Q | ++ | ++ | +++ |
| 1779/1780 | E39L | +++ | ++ | ++ |
| 1781/1782 | H84K/D316H | ++ | + | ++ |
| 1783/1784 | H92T/K283V/T392W | ++ | + | ++ |
| 1785/1786 | K283L | + | + | ++ |
| 1787/1788 | P166D/K283L/D284A | | | ++ |
| 1789/1790 | S31T/E39V/R44V/ | + | | ++ |
| | P166D/K302Y | | | |
| 1791/1792 | A339N | +++ | +++ | ++ |
| 1793/1794 | Y334C | + | + | ++ |
| 1795/1796 | E39L/H92V | + | + | ++ |
| 1797/1798 | H155F/A368E | ++ | ++ | ++ |
| 1799/1800 | H92V | +++ | +++ | ++ |
| 1801/1802 | H92V/D284S | + | + | ++ |
| 1803/1804 | D284E | ++ | ++ | ++ |
| 1805/1806 | T392W | ++ | + | ++ |
| 1807/1808 | H92V/D316H | +++ | +++ | ++ |
| 1809/1810 | K283P/T392W | + | + | ++ |
| 1811/1812 | A206T/Y334C | + | | ++ |
| 1813/1814 | A368E | +++ | ++ | ++ |
| 1815/1816 | E39V/T47R/G261S | | | ++ |
| 1817/1818 | Q275A | +++ | ++ | ++ |
| 1819/1820 | H92V/A206Y/Q275A | +++ | ++ | ++ |
| 1821/1822 | P10G | +++ | | + |
| 1823/1824 | H92T/A206E/R217N | +++ | +++ | + |
| 1825/1826 | T392A | +++ | +++ | + |
| 1827/1828 | T392D | ++ | + | + |
| 1829/1830 | E39V/R44V/A339N | +++ | ++ | + |
| 1831/1832 | E39V/R44V | +++ | +++ | + |
| 1833/1834 | A206Y | ++ | +++ | + |
| 1835/1836 | H92T/A271K/K277R | ++ | + | + |
| 1837/1838 | H92T/A206E/K302T/ | +++ | + | + |
| | A368E | | | |
| 1839/1840 | A206E | ++ | + | + |
| 1841/1842 | H84K | ++ | ++ | + |
| 1843/1844 | P166D | +++ | + | + |
| 1845/1846 | A206E/R217N | ++ | ++ | + |
| 1847/1848 | H155F/R217I | ++ | + | + |
| 1849/1850 | P10G/T392D | ++ | | + |
| 1851/1852 | E39L/A206E | ++ | ++ | + |
| 1853/1854 | K302Y | +++ | +++ | + |
| 1855/1856 | H92V/K302L | ++ | + | + |
| 1857/1858 | H92T/K302L | ++ | + | + |
| 1859/1860 | P166D/K302Y | ++ | | |
| 1861/1862 | R44V/D284E/K302Y | ++ | + | |
| 1863/1864 | P166D/K283T | + | | + |

¹All activities were determined relative to the reference polypeptide of SEQ ID NO: 1022. Levels of increased activity are defined as follows: “+” = 0.5-0.9; “++” >0.9; “+++” >1.1; and “++++” >2.

### Serum Stability of Purified GLA Variants Produced in Suspension Cultures

[0202] To assess the relative stability of variants in the presence of blood, samples were exposed to serum. First, 100 μL of 7.5 ug/mL purified GLA variants in 1×PBS, pH 6.2, and 90 uL of human serum were added to the wells of a COSTAR® 96-well round bottom plate (Corning). The plates were sealed and incubated at 37° C., for 0-24h. For the assay, 50 μL of challenged supernatant were mixed with 50 μL of 1 mM MUGal in McIlvaine buffer, pH 4.4. The reactions were mixed briefly and incubated at 37° C. for 90 minutes, prior to quenching with 100 μL of 0.5 M sodium carbonate, pH 10.2. Hydrolysis was analyzed using an ENVISION® microplate reader (PerkinElmer) monitoring fluorescence (Ex. 355 nm, Em. 460 nm). Percent residual activity in serum after 24h was calculated by dividing the activity of challenged samples by the activity of unchallenged samples, in which “unchallenged” is hydrolysis measured at time 0 and “challenged” is hydrolysis measured at the specified time points for each variant. FIG. 7 provides a graph showing the residual activity of GLA variants after a challenge with human serum for 0-24 hrs.

### Cellular Uptake in Fabry Fibroblasts of Purified GLA Variants Produced in Suspension Cultures

[0203] Cellular uptake of GLA variants as compared to a reference enzyme (WT GLA [SEQ ID NO: 2]), was determined to assess the overall ability of the variants to be endocytosed into cultured cells. Fabry fibroblasts (GM02775, Coriell Institute for Medical Research) were seeded into a 96-well culture dish (VWR, #10861-698) containing Minimal Essential Media (MEM; Gibco #11095-080, supplemented with 1% non-essential amino acids (NEAA; Gibco #11140-050) and 15% fetal bovine serum [Corning #35-016-CV]) and allowed to grow to confluency (1-3 days at 37° C., 5% CO₂). After reaching confluency, supplemented MEM was removed by sterile vacuum and replaced with 1 mL/well serum-free MEM+1% NEAA. Enzymes purified as described in Example 4, were added to the cells in a dose response from 220 nM to 2 nM and allowed to incubate for 4 hours at 37° C., 5% CO₂. Cells were washed twice with 100 μL sterile 1×PBS/well, and the PBS was aspirated by sterile vacuum. Cells were then incubated in containing Minimal Essential Media (MEM; Gibco #11095-080, supplemented with 1% non-essential amino acids (NEAA; Gibco #11140-050) and 15% fetal bovine serum [Corning #35-016-CV]) and allowed to incubate at 37° C., 5% CO₂ for 3 days. After 3 days, the cells were washed twice with 100 μL sterile 1×PBS/well, and the PBS was aspirated by sterile vacuum. Then, 25 μL Lysis Buffer (0.2% TRITON X-100™ non-ionic surfactant [Sigma #93443] diluted in 1×PBS) was added to each sample, followed by sonication for 1-2 minutes, and centrifugation at 12,000-14,000 RPM for 10 minutes at 4° C. For the activity assay, 25 μL of cell lysis sample was mixed with 25 μL of 2.5 mM MUGal in McIlvaine buffer, pH 4.6. The reaction plates were sealed and incubated at 37° C. for 60 minutes, prior to reaction quenching with 150 μL of 0.5 M sodium carbonate, pH 10.2 per well. MUGal hydrolysis was determined using an ENVISION® microplate reader (PerkinElmer) monitoring fluorescence (Ex. 355 nm, Em. 460 nm). FIG. 8 provides a graph of the cellular uptake of purified GLA variants in cultured Fabry patient fibroblasts after 4 hours incubation and 3 day washout at 37° C.

### Example 14

### In Vivo Characterization of GLA Variants

[0204] In this Example, experiments conducted using animal models to characterize some GLA variants are described. A summary of the study design to assess the pharmacokinetic profiles in mice is provided in Table 14-1. The study was conducted in a single phase and included 36 male C57Bl/6 mice (20-25 g). Animals were acclimated for at least three days prior to the experiment. All animals received a 1 mg/kg single IV injection, via tail vein, of either WT GLA (SEQ ID NO: 2) or GLA variants. Individual doses were calculated based on body weights taken on the day of dosing.

TABLE 14-1
Summary of Study Design

| | | | | Post- |
|---|---|---|---|---|
| Group #/ | | | | Dose Blood |
| Enzyme | Number of | CDX-variant | Dose Vol | Collection |
| SEQ ID NO: | Mice | (mg/kg) | (mL) | Time Points |
| 1/SEQ ID NO: 2 | 6 | 1 | 0.2 | 5, 20, 40, and |
| 2/SEQ ID NO: 4 | 6 | 1 | 0.2 | 240 minutes |
| 3/SEQ ID NO: 58 | 6 | 1 | 0.2 | |
| 4/SEQ ID NO: 2 | 6 | 1 | 0.2 | 10, 30, 60, and |
| 5/SEQ ID NO: 4 | 6 | 1 | 0.2 | 360 minutes |
| 6/SEQ ID NO: 58 | 6 | 1 | 0.2 | |

[0205] At the pre-determined time points, approximately 150 μL of whole blood was collected from six mice per test article (alternating between the two groups of 6 for each time point according to Table 14-1) into heparinized capillary tubes, processed immediately for plasma, and stored at −80° C. until assay. Plasma GLA activity was measured using a the standard fluorometric MuGal assay, as described in Example 5. Overall, GLA variants demonstrated superior plasma pharmacokinetic profiles compared to SEQ ID NO: 2, with the latter having the fastest clearance with an estimated half-life (t_{1/2}) of about 10 min. In comparison, the t_{1/2} for GLA variants were approximately 10 times higher. The data are provided in Table 14-2.

TABLE 14-2
PK Parameters for GLA Variants Following
IV Administration in Mice

| | Half | | | | |
|---|---|---|---|---|---|
| Enzyme | Life | Cₘₐₓ | AUC₀₋ₜ | CL | Vz |
| (SEQ ID NO:) | (hr) | (μg/mL) | (μg*h/mL) | (L/h/kg) | (L/kg) |
| SEQ ID NO: 2 | 0.15 | 4.96 | 1.26 | 0.792 | 0.170 |
| SEQ ID NO: 4 | 1.58 | 13.3 | 12.37 | 0.076 | 0.174 |
| SEQ ID NO: 58 | 1.70 | 26.6 | 18.25 | 0.051 | 0.125 |

[0206] In addition to the mouse studies described above, experiments conducted to determine the pharmacokinetics of some GLA variants in healthy rats. A brief study design is shown in Table 14-3. The first study was conducted in 3 phases and included 21 rats Animals were acclimated for at least three days prior to experiment. All animals received an IV injection, via jugular cannula, of either WT GLA (SEQ ID NO: 2) or a GLA variant. Individual doses were calculated based on body weights taken on the day of dosing.

TABLE 14-3
Summary of Study Design

| Group #/ | | | | Blood |
|---|---|---|---|---|
| Enzyme | Number of | CDX-variant | Dose Vol | Collection |
| SEQ ID NO: | Rats | (mg/kg) | (mL/kg) | Time Points |
| 1/SEQ ID NO: 2 | 3 | 1 | 0.5 | 5, 10, 20, 30, |
| 2/SEQ ID NO: 6 | 3 | 1 | 0.5 | 60 minutes; 4 |
| 3/SEQ ID NO: 16 | 3 | 1 | 0.5 | and 8 hours |
| 4/SEQ ID NO: 58 | 3 | 1 | 0.5 | |
| 5/SEQ ID NO: 60 | 3 | 1 | 0.5 | |
| 6/SEQ ID NO: 40 | 3 | 1 | 0.5 | |
| 7/SEQ ID NO: 62 | 3 | 1 | 0.5 | |

[0207] Blood (approximately 0.25 mL) was collected at the pre-determined time points, shown in Table 14-3, from each rat, into EDTA separator tubes, processed immediately for plasma, and stored at −80° C. until assay. Plasma GLA activity was measured using the standard fluorometric MuGal assay, as described in Example 5. All GLA variants demonstrated improved PK properties when compared to SEQ ID NO: 2. The data for all PK parameters are provided in Table 14-4.

TABLE 14-4
PK Parameters for GLA Variants Following IV Administration in Rats

| | Half | | | | CL | Vz |
|---|---|---|---|---|---|---|
| Enzyme | Life | Cₘₐₓ | AUC₀₋ₜ | AUC_{0-inf} | (mL/h/kg | (mL/kg |
| (SEQ ID NO:) | (hr) | (μRFU/mL) | (RFU*h/mL) | (RFU*hr/mL) | per RFU/ng) | per RFU/ng) |
| SEQ ID NO: 2 | 0.29 | 27928 | 25119 | 30043 | 33.29 | 177.7 |
| SEQ ID NO: 6 | 4.03 | 31448 | 151918 | 204505 | 4.89 | 28.5 |
| SEQ ID NO: 16 | 1.90 | 29612 | 103002 | 108390 | 9.23 | 25.3 |
| SEQ ID NO: 58 | 2.36 | 28501 | 80216 | 88512 | 11.3 | 38.5 |
| SEQ ID NO: 60 | 2.24 | 32473 | 79210 | 86890 | 11.5 | 37.2 |
| SEQ ID NO: 40 | 2.03 | 28158 | 60334 | 64303 | 15.6 | 45.5 |
| SEQ ID NO: 62 | 2.11 | 32811 | 104884 | 113191 | 8.83 | 26.9 |

[0208] A brief study design for rat PK study number 2 is provided in Table 14-5. The study was conducted in 1 phase and included 18 rats. Animals were acclimated for at least three days prior to experiment. All animals received an IV injection, via jugular vein cannula, of either WT GLA (SEQ ID NO: 2) or a GLA variant. Individual doses were calculated based on body weights taken on the day of dosing.

TABLE 14-5
Summary of Study Design

| Group #/ | | | | Blood |
|---|---|---|---|---|
| Enzyme | Number of | CDX-variant | Dose Vol | Collection |
| SEQ ID NO: | Rats | (mg/kg) | (mL/kg) | Time Points |
| 1/SEQ ID NO: 2 | 3 | 1 | 0.5 | 5, 10, 20, |
| 3/SEQ ID NO: 4 | 3 | 1 | 0.5 | 30, 60 minutes; |
| 4/SEQ ID NO: 6 | 3 | 1 | 0.5 | 4 and 8 hours |
| 5/SEQ ID NO: 8 | 3 | 1 | 0.5 | |
| 6/SEQ ID NO: 58 | | | | |

[0209] Blood (approximately 0.25 mL) was collected at the pre-determined time points, shown in Table 14-5, into EDTA separator tubes, processed immediately for plasma, and stored at −80° C. until assay. Plasma GLA activity was measured using the standard fluorometric MuGal assay, as described in Example 5. All doses of GLA variants resulted in improved PK properties when compared to SEQ ID NO: 2. Data for all PK parameters are provided in Table 14-6.

TABLE 14-6
PK Parameters for GLA Variants Following IV Administration in Rats

| | Half | | | CL | Vz |
|---|---|---|---|---|---|
| Enzyme | Life | Cₘₐₓ | AUC₀₋ₜ | (mL/h/kg | (mL/kg |
| (SEQ ID NO:) | (hr) | (μRFU/mL) | (RFU*h/mL) | per RFU/ng) | per RFU/ng) |
| SEQ ID NO: 2 | 0.23 | 21119 | 14268 | 70.1 | 23.6 |
| SEQ ID NO: 4 | 4.24 | 23545 | 96634 | 7.47 | 45.7 |
| SEQ ID NO: 6 | 2.94 | 21708 | 72432 | 11.68 | 49.5 |
| SEQ ID NO: 8 | 3.43 | 23922 | 86509 | 9.34 | 46.2 |
| SEQ ID NO: 58 | 2.02 | 23055 | 55193 | 16.96 | 49.3 |

[0210] In addition to the mouse and rat studies described above, experiments were conducted in a primate model. A brief study design is shown in Table 14-7. The study was conducted in 1 phase and included 12 male cynomolgus monkeys (2-3 kg) Animals were sourced from the test facility's colony and were considered protein naive. All animals received an IV injection, of either WT GLA (SEQ ID NO: 2) or a GLA variant. Individual doses were calculated based on body weights taken on the day of dosing

TABLE 14-7
Summary of Study Design

| Group #/ | | | | Blood |
|---|---|---|---|---|
| Enzyme | Number of | CDX-variant | Dose Vol | Collection |
| SEQ ID NO: | Monkeys | (mg/kg) | (mL/kg) | Time Points |
| 1/SEQ ID NO: 2 | 4 | 1 | 1 | 15, 30, 45, |
| 2/SEQ ID NO: 4 | 4 | 1 | 1 | 60, 90 minutes; |
| 3/SEQ ID NO: 58 | 4 | 1 | 1 | 2, 4, 6, 8, 12, |
| | | | | 24 and 48 |
| | | | | hours |

[0211] Blood (approximately 0.5 mL) was collected at the pre-determined time points, shown in Table 14-7, into EDTA separator tubes, processed immediately for plasma, and stored at −80° C. until assay. Plasma GLA activity was measured using the standard fluorometric MuGal assay, as described in Example 5. All doses of GLA variants resulted in improved PK properties when compared to SEQ ID NO: 2. Data for all PK parameters are provided in Table 14-8).

TABLE 14-8
PK Parameters for GLA Variants Following
IV Administration in Cynomolgus Monkeys

| | Half | | | | |
|---|---|---|---|---|---|
| Enzyme | Life | Cₘₐₓ | AUC₀₋ₜ | CL | Vz |
| (SEQ ID NO:) | (hr) | (μg/mL) | (μg *h/mL) | (L/h/kg) | (L/kg) |
| SEQ ID NO: 2 | 0.19 | 21.9 | 10.2 | 0.15 | 0.04 |
| SEQ ID NO: 4 | 5.2 | 33.5 | 108 | 0.009 | 0.07 |
| SEQ ID NO: 58 | 1.32 | 26.5 | 35.2 | 0.03 | 0.05 |

[0212] A brief study design is shown in Table 14-9 for the second PK study in monkeys. The study was conducted in 1 phase and included 12 cynomolgus monkeys (3 animals/group) Animals were sourced from the test facility's colony and were considered GLA protein naive. All animals received an IV injection, of either WT GLA (SEQ ID NO: 2) or a GLA variant. Individual doses were calculated based on body weights taken on the day of dosing. Blood samples were taken at the following time points: pre-dose (up to 3 hr), 1, 5, 15, 30 minutes, 1, 2, 4, 8, 12 and 24 hours post dose.

TABLE 14-9
Summary of Study Design

| | | TI Dose | TI | TI Dose |
|---|---|---|---|---|
| Enzyme | Route of | Level | Concentration | Volume |
| (SEQ ID NO:) | Administration | (mg/kg) | (mg/mL) | (mL/kg) |
| SEQ ID NO: 2 | IV | 1 | 1 | 1 |
| SEQ ID NO: 158 | | | | |
| SEQ ID NO: 704 | | | | |
| SEQ ID NO: 1022 | | | | |

[0213] Blood (approximately 1 mL) was collected at the pre-determined time points, shown in Table 14-7, into EDTA separator tubes, processed immediately for plasma, and stored at −80° C. until assay. Plasma GLA activity was measured using the standard fluorometric MuGal assay, as described in Example 5. All doses of GLA variants resulted in improved PK properties when compared to SEQ ID NO: 2. Data for all PK parameters are provided in Table 14-10.

TABLE 14-10
PK Parameters for GLA Variants Following
IV Administration in Monkeys

| | Half | | | | |
|---|---|---|---|---|---|
| Enzyme | Life | Cₘₐₓ | AUC₀₋ₜ | CL | Vz |
| (SEQ ID NO:) | (hr) | (μg/mL) | (μg *h/mL) | (L/h/kg) | (L/kg) |
| SEQ ID NO: 2 | 0.23 | 19.7 | 5.63 | 0.185 | 0.061 |
| SEQ ID NO: 158 | 1.96 | 33.2 | 19.8 | 0.051 | 0.144 |
| SEQ ID NO: 704 | 2.46 | 24.5 | 14.8 | 0.074 | 0.266 |
| SEQ ID NO: 1022 | 3.60 | 24.9 | 14.1 | 0.071 | 0.370 |

Efficacy of GLA Variants Compared to rhGLA in Fabry Knockout Mice

[0214] Fabry mice (5 month old females; Jackson, stock #3535) and age/sex matched wildtype mice with the identical genetic background were used to assess the efficacy of six GLA variants (SEQ ID NO: 4, 58, 158, 704, 1022, and 1864) compared to WT GLA (SEQ ID NO: 2). Mice were administered enzyme variants (0.1, 0.3, or 1.0 mg/kg, via tail vein injection), once a week for 4 weeks (n=5/group). 7 days after the last injection, animals were anesthetized to perform a cardiac puncture for blood collection in K3 EDTA tubes, and then euthanized. Whole body perfusion, through the heart, was performed with cold saline to remove contaminating blood from tissues. Disease relevant tissues (e.g., heart and kidney) were dissected into two portions (one for enzyme activity assay, the other for Gb3 and lyso-Gb3 quantification), frozen on dry ice, and stored at −80° C. until analysis. Blood was processed immediately for plasma, and stored at −80° C. until assay. Plasma and tissue GLA activity was measured using the standard fluorometric MuGal assay, as described in Example 5. Plasma and tissue Gb3 and lyso Gb3 levels were assessed using the method referenced in Example 10, and tissues were homogenized as described in Example 10. With the exception in some cases of SEQ ID NO: 1864, all GLA variants were more efficacious than SEQ ID NO: 2 in the Fabry mouse model.

[0215] FIGS. 9 and 10 provide graphs showing in vivo enzyme activity in the heart and kidney, respectively, in the Fabry mouse model, 7 days after the last treatment. In FIG. 9, the data are represented as the mean±SEM. Two-way ANOVA with Dunnett's post-test was used to compare the results with those of SEQ ID NO: 2; “∧”, p<0.0001, non-favorable significant improvements over SEQ ID NO:2 are not shown in this Figure. In FIG. 10, the data are represented as the mean±SEM. Two-way ANOVA with Dunnett's post-test was used to compare the results with those of SEQ ID NO: 2; “*” p<0.05; “∧” p<0.005; and “∧”, p<0.0001, non-favorable significant improvements over SEQ ID NO:2 are not shown in this Figure. FIGS. 11 and 12 provide graphs of Gb3 degradation in heart and kidney tissue, respectively. In FIG. 11, the data are represented as the mean±SEM. Two-way ANOVA with Dunnett's post-test was used to compare the results with those of SEQ ID NO: 2; at 0.1 mg/kg dose, “*”, p<0.05 for SEQ ID NOS: 158 and 1022; and at 0.3 mg/kg dose, “∧”, p<0.0001, for SEQ ID NO: 158; “**”, p<0.005 for SEQ ID NOS: 58, 704, 1022, and 1864. In FIG. 12, the data are represented as the mean±SEM. Two-way ANOVA with Dunnett's post-test was used to compare the results with those of SEQ ID NO: 2; at 0.1 mg/kg dose, “∧”, p<0.0001 for SEQ ID NOS: 4, 58, 158, 704, and 1022; and at 0.3 mg/kg dose, “∧”, p<0.0001, for SEQ ID NO: 158; “**”, p<0.005 for SEQ ID NOS: 4, 58, 704, and 1022. FIGS. 13 and 14 provide graphs of lyso-Gb3 degradation in heart and kidney tissue, respectively. In FIG. 13, the data are represented as the mean±SEM. Two-way ANOVA with Dunnett's post-test was used to compare the results with those of SEQ ID NO: 2. In FIG. 14, the data are represented as the mean±SEM. Two-way ANOVA with Dunnett's post-test was used to compare the results with those of SEQ ID NO: 2; at 0.1 mg/kg dose, “∧”, p<0.005 for SEQ ID NOS: 4, 58, 158; “*”, p<0.05 for SEQ ID NO: 704.

[0216] While the invention has been described with reference to the specific embodiments, various changes can be made and equivalents can be substituted to adapt to a particular situation, material, composition of matter, process, process step or steps, thereby achieving benefits of the invention without departing from the scope of what is claimed.

[0217] For all purposes in the United States of America, each and every publication and patent document cited in this disclosure is incorporated herein by reference as if each such publication or document was specifically and individually indicated to be incorporated herein by reference. Citation of publications and patent documents is not intended as an indication that any such document is pertinent prior art, nor does it constitute an admission as to its contents or date.

The application's sequence listing, which the Patent Office published only in electronic form, follows.

SEQUENCE LISTING (1864 sequences)

SEQ ID NO: 1 - DNA, 1194 bp, Artificial Sequence
  wild type human alpha-galactosidase A
ttggataacgggttagcccgtacacctactatgggttggcttcactgggaaagattcatgtgtaacttagattgccaagaagagcctgacagctgtatctcagagaaactattcatggagatggctgaactaatggtaagtgaaggatggaaggatgctggttatgaatacctatgtattgatgattgctggatggctccacagcgtgattcagaaggtaggttacaagctgacccccagagattcccacatggcatacgtcagcttgcaaactacgtacacagcaagggtctaaagttaggcatctacgctgatgtcggaaacaagacatgtgctggtttcccaggttcattcggttactatgacatagatgcgcagacgtttgctgattggggtgttgatttgttgaagtttgatggatgctactgcgattccctggagaacctagccgatgggtacaaacacatgagtttggctctaaacaggactggtaggagcatcgtctatagttgtgaatggcccttgtacatgtggccgtttcagaagccaaactacactgagataagacaatactgtaaccattggcgtaactttgctgacatagatgattcatggaagtcaatcaaatctatcttggattggacttctttcaaccaggaaagaattgttgatgttgcaggtccaggtggatggaatgaccctgatatgcttgtcatagggaactttgggctatcatggaatcaacaagttacacaaatggctttgtgggcgatcatggccgcacccctattcatgtctaatgatctacgtcacatatcaccccaagcaaaggctttacttcaagataaggatgtcatagcgatcaaccaagatcctcttggtaaacaaggttatcaattgagacaaggtgacaactttgaagtgtgggaaagaccattgtctggacttgcgtgggctgttgctatgatcaaccgtcaagagatcggagggccaagatcttacactatcgcggtagcctctttgggtaagggtgttgcgtgcaatcctgcctgcttcattacacaattgcttccagttaagagaaagttgggtttctatgagtggacatctaggctaagaagtcacatcaatcctactggtacggtattgttgcaattggagaacacaatgcaaatgtctttgaaagatttgtta

SEQ ID NO: 2 - protein, 398 aa, Artificial Sequence
  wild type human alpha-galactosidase A
LDNGLARTPTMGWLHWERFMCNLDCQEEPDSCISEKLFMEMAELMVSEGWKDAGYEYLCIDDCWMAPQRDSEGRLQADPQRFPHGIRQLANYVHSKGLKLGIYADVGNKTCAGFPGSFGYYDIDAQTFADWGVDLLKFDGCYCDSLENLADGYKHMSLALNRTGRSIVYSCEWPLYMWPFQKPNYTEIRQYCNHWRNFADIDDSWKSIKSILDWTSFNQERIVDVAGPGGWNDPDMLVIGNFGLSWNQQVTQMALWAIMAAPLFMSNDLRHISPQAKALLQDKDVIAINQDPLGKQGYQLRQGDNFEVWERPLSGLAWAVAMINRQEIGGPRSYTIAVASLGKGVACNPACFITQLLPVKRKLGFYEWTSRLRSHINPTGTVLLQLENTMQMSLKDLL

SEQ ID NO: 3 - DNA, 1194 bp, Artificial Sequence
  variant of human alpha-galactosidase A
ttggataacgggttagcccgtacacctactatgggttggcttcactgggaaagattcatgtgtaacttagattgccaagaagagcctgacagctgtatctcagagaaactattcatggagatggctgaacggatggtaagtgaaggatggaaggatgctggttatgaatacctatgtattgatgattgctggatggctccacagcgtgattcagaaggtaggttacaagctgacccccagagattcccacatggcatacgtcagcttgcaaactacgtacacagcaaaggtctaaagttaggcatctacgctgatgtcggaaacaagacatgtgctggtttcccaggttcattcggttactatgacatagatgcgcagacgtttgctgattggggtgttgatttgttgaagtttgatggatgctactgcgattccctggagaacctagccgatgggtacaaacacatgagtttggctctaaacaggactggtaggccgatcgtctatagttgtgaatggcccttgtacatgtggccgtttcagaagccaaactacactgagataagacaatactgtaaccattggcgtaactttgctgacatagatgattcatgggcttcaatcaaatctatcttggattggacttctcgtaaccaggaaagaattgttgatgttgcaggtccaggtggatggaatgaccctgatatgcttgtcatagggaactttgggctatcatgggaccaacaagttacacaaatggctttgtgggcgatcatggccgcacccctattcatgtctaatgatctacgtcacatatcaccccaagcaaaggctttacttcaagataaggatgtcatagcgatcaaccaagatcctcttggtaaacaaggttatcaattgagaaaaggtgacaactttgaagtgtgggaaagaccattgtctggagatgcgtgggctgttgctattatcaaccgtcaagagatcggagggccaagatcttacactatcccggtagcctctttgggtaagggtgttgcgtgcaatcctgcctgcttcattacacaattgcttccagttaagagacaattgggtttctatgaatggacctctaggctaaaaagtcacattaatcctactggtacggtattgttgcaattggagaacacaatgcaaatgtctttgaaagatttgtta

SEQ ID NO: 4 - protein, 398 aa, Artificial Sequence
  variant of human alpha-galactosidase A
LDNGLARTPTMGWLHWERFMCNLDCQEEPDSCISEKLFMEMAERMVSEGWKDAGYEYLCIDDCWMAPQRDSEGRLQADPQRFPHGIRQLANYVHSKGLKLGIYADVGNKTCAGFPGSFGYYDIDAQTFADWGVDLLKFDGCYCDSLENLADGYKHMSLALNRTGRPIVYSCEWPLYMWPFQKPNYTEIRQYCNHWRNFADIDDSWASIKSILDWTSRNQERIVDVAGPGGWNDPDMLVIGNFGLSWDQQVTQMALWAIMAAPLFMSNDLRHISPQAKALLQDKDVIAINQDPLGKQGYQLRKGDNFEVWERPLSGDAWAVAIINRQEIGGPRSYTIPVASLGKGVACNPACFITQLLPVKRQLGFYEWTSRLKSHINPTGTVLLQLENTMQMSLKDLL

SEQ ID NO: 5 - DNA, 1194 bp, Artificial Sequence
  variant of human alpha-galactosidase A
ttggataacgggttagcccgtacacctccgatgggttggcttcactgggaaagattcatgtgtaacttagattgccaagaagagcctgacagctgtatctcagagaaactattcgaagagatggctgaacggatggtaaccgaaggatggaaggatgctggttatgaatacctatgtattgatgattgctggatggctccacagcgtgattcagaaggtaggttacaagctgacccccagagattcccacatggcatacgtcagcttgcaaaccatgtacacagcaaaggtctaaagttaggcatctacgctgatgtcggaaacaagacatgtgctggtttcccaggttcattcggttactatgacatagatgcgcagacgtttgctgattggggtgttgatttgttgaagtttgatggatgctactgcgattccctggagaacctagccgatgggtacaaacacatgagtttggctctaaacaggactggtaggccgatcgtctatagttgtgaatggcccttgtacatgtggccgtttcagaagccaaactacactgagataagacaatactgtaaccattggcgtaactttgctgacatagatgattcatgggcttcaatcaaatctatcttggattggacttctcgtaaccaggaaagaattgttgatgttgcaggtccaggtggatggaatgaccctgatatgcttgtcatagggaactttgggctatcatgggaccaacaagttacacaaatggctttgtgggcgatcatggccggccccctattcatgtctaatgatctacgtgcgatatcaccccaagcaaaggctttacttcaagataaggatgtcatagcgatcaaccaagatcctcttggtaaacaaggttatcaattgagaaaaggtgacaactttgaagtgtgggaaagaccattgtctggagatgcgtgggctgttgctattatcaaccgtcaagagatcggagggccaagatcttacactatcccggtagcctctttgggtaagggtgttgcgtgcaatcctgcctgcttcattacacaattgcttccagttaagagacaattgggtttctataacgcaacctctaggctaaaaagtcacattaatcctactggtacggtattgttgcaattggagaacacaatgcaaacctctttgaaagatttgtta

SEQ ID NO: 6 - protein, 398 aa, Artificial Sequence
  variant of human alpha-galactosidase A
LDNGLARTPPMGWLHWERFMCNLDCQEEPDSCISEKLFEEMAERMVTEGWKDAGYEYLCIDDCWMAPQRDSEGRLQADPQRFPHGIRQLANHVHSKGLKLGIYADVGNKTCAGFPGSFGYYDIDAQTFADWGVDLLKFDGCYCDSLENLADGYKHMSLALNRTGRPIVYSCEWPLYMWPFQKPNYTEIRQYCNHWRNFADIDDSWASIKSILDWTSRNQERIVDVAGPGGWNDPDMLVIGNFGLSWDQQVTQMALWAIMAGPLFMSNDLRAISPQAKALLQDKDVIAINQDPLGKQGYQLRKGDNFEVWERPLSGDAWAVAIINRQEIGGPRSYTIPVASLGKGVACNPACFITQLLPVKRQLGFYNATSRLKSHINPTGTVLLQLENTMQTSLKDLL

SEQ ID NO: 7 - DNA, 1194 bp, Artificial Sequence
  variant of human alpha-galactosidase A
ttggataacgggttagcccgtacacctccgatgggttggcttcactgggaaagattcatgtgtaacttagattgccaagaagagcctgacagctgtatctcagagaaactattcgaagagatggctgaacggatggtaaccgaaggatggaaggatgctggttatgaatacctatgtattgatgattgctggatggctccacagcgtgattcagaaggtaggttacaagctgacccccagagattcccacatggcatacgtcagcttgcaaaccatgtacacagcaaaggtctaaagttaggcatctacgctgatgtcggaaacaagacatgtgctggtttcccaggttcattcggttactatgacatagatgcgcagacgtttgctgattggggtgttgatttgttgaagtttgatggatgctactgcgattccctggagaacctagccgatgggtacaaacacatgagtttggctctaaacaggactggtaggccgatcgtctatagttgtgaatggcccttgtacatgtggccgtttcagaagccaaactacactgagataagacaatactgtaaccattggcgtaactttgctgacatagatgattcatgggcttcaatcaaatctatcttggattggacttctcgtaaccaggaaagaattgttgatgttgcaggtccaggtggatggaatgaccctgatatgcttgtcatagggaactttgggctatcatgggaccaacaagttacacaaatggctttgtgggcgatcatggccggccccctattcatgtctaatgatctacgtgcgatatcaccccaagcaaaggctttacttcaagataaggatgtcatagcgatcaaccaagatcctcttggtaaacaaggttatcaattgagaaaaggtgacaactttgaagtgtgggaaagaccattgtctggagatgcgtgggctgttgctattatcaaccgtcaagagatcggagggccaagatcttacactatcccggtagcctctttgggtaagggtgttgcgtgcaatcctgcctgcttcattacacaattgcttccagttaagagacaattgggtttctatgaagcaacctctaggctaaaaagtcacattaatcctactggtacggtattgttgcaattggagaacacaatgcaaacctctttgaaagatttgtta

SEQ ID NO: 8 - protein, 398 aa, Artificial Sequence
  variant of human alpha-galactosidase A
LDNGLARTPPMGWLHWERFMCNLDCQEEPDSCISEKLFEEMAERMVTEGWKDAGYEYLCIDDCWMAPQRDSEGRLQADPQRFPHGIRQLANHVHSKGLKLGIYADVGNKTCAGFPGSFGYYDIDAQTFADWGVDLLKFDGCYCDSLENLADGYKHMSLALNRTGRPIVYSCEWPLYMWPFQKPNYTEIRQYCNHWRNFADIDDSWASIKSILDWTSRNQERIVDVAGPGGWNDPDMLVIGNFGLSWDQQVTQMALWAIMAGPLFMSNDLRAISPQAKALLQDKDVIAINQDPLGKQGYQLRKGDNFEVWERPLSGDAWAVAIINRQEIGGPRSYTIPVASLGKGVACNPACFITQLLPVKRQLGFYEATSRLKSHINPTGTVLLQLENTMQTSLKDLL

SEQ ID NO: 9 - DNA, 1194 bp, Artificial Sequence
  variant of human alpha-galactosidase A
ttggataacgggttagcccgtacacctccgatgggttggcttcactgggaaagattcatgtgtaacttagattgccaagaagagcctgacagctgtatctcagagaaactattcgaagagatggctgaactgatggtaaccgaaggatggaaggatgctggttatgaatacctatgtattgatgattgctggatggctccacagcgtgattcagaaggtaggttacaagctgacccccagagattcccacatggcatacgtcagcttgcaaaccatgtacacagcaaaggtctaaagttaggcatctacgctgatgtcggaaacaagacatgtgctggtttcccaggttcattcggttactatgacatagatgcgcagacgtttgctgattggggtgttgatttgttgaagtttgatggatgctactgcgattccctggagaacctagccgatgggtacaaacacatgagtttggctctaaacaggactggtaggccgatcgtctatagttgtgaatggcccttgtacatgtggccgtttcagaagccaaactacactgagataagacaatactgtaaccattggcgtaactttgctgacatagatgattcatgggcttcaatcaaatctatcttggattggacttctcgcaaccaggaaagaattgttgatgttgcaggtccaggtggatggaatgaccctgatatgcttgtcatagggaactttgggctatcatggaaccaacaagttacacaaatggctttgtgggcgatcatggccggccccctattcatgtctaatgatctacgtgcgatatcaccccaagcaaaggctttacttcaagataaggatgtcatagcgatcaaccaagatcctcttggtaaacaaggttatcaattgagaaaaggtgacaactttgaagtgtgggaaagaccattgtctggagacgcgtgggctgttgctattatcaaccgtcaagagatcggagggccaagatcttacactatcgcggtagcctctttgggtaagggtgttgcgtgcaatcctgcctgcttcattacacaattgcttccagttaagagacaattgggtttctatgaagcaacctctaggctaaaaagtcacattaatcctactggtacggtattgttgcaattggagaacacaatgcaaacctctttgaaagatttgtta

SEQ ID NO: 10 - protein, 398 aa, Artificial Sequence
  variant of human alpha-galactosidase A
LDNGLARTPPMGWLHWERFMCNLDCQEEPDSCISEKLFEEMAELMVTEGWKDAGYEYLCIDDCWMAPQRDSEGRLQADPQRFPHGIRQLANHVHSKGLKLGIYADVGNKTCAGFPGSFGYYDIDAQTFADWGVDLLKFDGCYCDSLENLADGYKHMSLALNRTGRPIVYSCEWPLYMWPFQKPNYTEIRQYCNHWRNFADIDDSWASIKSILDWTSRNQERIVDVAGPGGWNDPDMLVIGNFGLSWNQQVTQMALWAIMAGPLFMSNDLRAISPQAKALLQDKDVIAINQDPLGKQGYQLRKGDNFEVWERPLSGDAWAVAIINRQEIGGPRSYTIAVASLGKGVACNPACFITQLLPVKRQLGFYEATSRLKSHINPTGTVLLQLENTMQTSLKDLL

SEQ ID NO: 11 - DNA, 1194 bp, Artificial Sequence
  variant of human alpha-galactosidase A
ttggataacgggttagcccgtacacctccgatgggttggcttcactgggaaagattcatgtgtaacttagattgccaagaagagcctgacagctgtatctcagagaaactattcgaagagatggctgaactgatggtaaccgaaggatggaaggatgctggttatgaatacctatgtattgatgattgctggatggctccacagcgtgattcagaaggtaggttacaagctgacccccagagattcccacatggcatacgtcagcttgcaaaccatgtacacagcaaaggtctaaagttaggcatctacgctgatgtcggaaacaagacatgtgctggtttcccaggttcattcggttactatgacatagatgcgcagacgtttgctgattggggtgttgatttgttgaagtttgatggatgctactgcgattccctggagaacctagccgatgggtacaaacacatgagtttggctctaaacaggactggtaggccgatcgtctatagttgtgaatggcccttgtacatgtggccgtttcagaagccaaactacactgagataagacaatactgtaaccattggcgtaactttgctgacatagatgattcatgggcttcaatcaaatctatcttggattggacttctcgtaaccaggaaagaattgttgatgttgcaggtccaggtggatggaatgaccctgatatgcttgtcatagggaactttgggctatcatgggaccaacaagttacacaaatggctttgtgggcgatcatggccggccccctattcatgtctaatgatctacgtgcgatatcaccccaagcaaaggctttacttcaagataaggatgtcatagcgatcaaccaagatcctcttggtaaacaaggttatcaattgagacaaggtgacaactttgaagtgtgggaaagaccattgtctggagatgcgtgggctgttgctattatcaaccgtcaagagatcggagggccaagatcttacactatcccggtagcctctttgggtaagggtgttgcgtgcaatcctgcctgcttcattacacaattgcttccagttaagagacaattgggtttctatgaagcaacctctaggctaaaaagtcacattaatcctactggtacggtattgttgcaattggagaacacaatgcaaacctctttgaaagatttgtta

SEQ ID NO: 12 - protein, 398 aa, Artificial Sequence
  variant of human alpha-galactosidase A
LDNGLARTPPMGWLHWERFMCNLDCQEEPDSCISEKLFEEMAELMVTEGWKDAGYEYLCIDDCWMAPQRDSEGRLQADPQRFPHGIRQLANHVHSKGLKLGIYADVGNKTCAGFPGSFGYYDIDAQTFADWGVDLLKFDGCYCDSLENLADGYKHMSLALNRTGRPIVYSCEWPLYMWPFQKPNYTEIRQYCNHWRNFADIDDSWASIKSILDWTSRNQERIVDVAGPGGWNDPDMLVIGNFGLSWDQQVTQMALWAIMAGPLFMSNDLRAISPQAKALLQDKDVIAINQDPLGKQGYQLRQGDNFEVWERPLSGDAWAVAIINRQEIGGPRSYTIPVASLGKGVACNPACFITQLLPVKRQLGFYEATSRLKSHINPTGTVLLQLENTMQTSLKDLL

SEQ ID NO: 13 - DNA, 1194 bp, Artificial Sequence
  variant of human alpha-galactosidase A
ttggataacgggttagcccgtacacctccgatgggttggcttcactgggaaagattcatgtgtaacttagattgccaagaagagcctgacagctgtatctcagagaaactattcgaagagatggctgaactgatggtaaccgaaggatggaaggatgctggttatgaatacctatgtattgatgattgctggatggctccacagcgtgattcagaaggtaggttacaagctgacccccagagattcccacatggcatacgtcagcttgcaaaccatgtacacagcaaaggtctaaagttaggcatctacgctgatgtcggaaacaagacatgtgctggtttcccaggttcattcggttactatgacatagatgcgcagacgtttgctgattggggtgttgatttgttgaagtttgatggatgctactgcgattccctggagaacctagccgatgggtacaaacacatgagtttggctctaaacaggactggtaggccgatcgtctatagttgtgaatggcccttgtacatgtggccgtttcagaagccaaactacactgagataagacaatactgtaaccattggcgtaactttgctgacatagatgattcatgggcttcaatcaaatctatcttggattggacttctcgtaaccaggaaagaattgttgatgttgcaggtccaggtggatggaatgaccctgatatgcttgtcatagggaactttgggctatcatggaaccaacaagttacacaaatggctttgtgggcgatcatggccggccccctattcatgtctaatgatctacgtgcgatatcaccccaagcaaaggctttacttcaagataaggatgtcatagcgatcaaccaagatcctcttggtaaacaaggttatcaattgagacaaggtgacaactttgaagtgtgggaaagaccattgtctggagatgcgtgggctgttgctattatcaaccgtcaagagatcggagggccaagatcttacactatcccggtagcctctttgggtaagggtgttgcgtgcaatcctgcctgcttcattacacaattgcttccagttaagagacaattgggtttctatgaagcaacctctaggctaaaaagtcacattaatcctactggtacggtattgttgcaattggagaacacaatgcaaacctctttgaaagatttgtta

SEQ ID NO: 14 - protein, 398 aa, Artificial Sequence
  variant of human alpha-galactosidase A
LDNGLARTPPMGWLHWERFMCNLDCQEEPDSCISEKLFEEMAELMVTEGWKDAGYEYLCIDDCWMAPQRDSEGRLQADPQRFPHGIRQLANHVHSKGLKLGIYADVGNKTCAGFPGSFGYYDIDAQTFADWGVDLLKFDGCYCDSLENLADGYKHMSLALNRTGRPIVYSCEWPLYMWPFQKPNYTEIRQYCNHWRNFADIDDSWASIKSILDWTSRNQERIVDVAGPGGWNDPDMLVIGNFGLSWNQQVTQMALWAIMAGPLFMSNDLRAISPQAKALLQDKDVIAINQDPLGKQGYQLRQGDNFEVWERPLSGDAWAVAIINRQEIGGPRSYTIPVASLGKGVACNPACFITQLLPVKRQLGFYEATSRLKSHINPTGTVLLQLENTMQTSLKDLL

SEQ ID NO: 15 - DNA, 1194 bp, Artificial Sequence
  variant of human alpha-galactosidase A
ttggataacgggttagcccgtacacctccgatgggttggcttcactgggaaagattcatgtgtaacttagattgccaagaagagcctgacagctgtatctcagagaaactattcgaagagatggctgaacggatggtaaccgaaggatggaaggatgctggttatgaatacctatgtattgatgattgctggatggctccacagcgtgattcagaaggtaggttacaagctgacccccagagattcccacatggcatacgtcagcttgcaaaccatgtacacagcaaaggtctaaagttaggcatctacgctgatgtcggaaacaagacatgtgctggtttcccaggttcattcggttactatgacatagatgcgcagacgtttgctgattggggtgttgatttgttgaagtttgatggatgctactgcgattccctggagaacctagccgatgggtacaaacacatgagtttggctctaaacaggactggtaggccgatcgtctatagttgtgaatggcccttgtacatgtggccgtttcagaagccaaactacactgagataagacaatactgtaaccattggcgtaactttgctgacatagatgattcatgggcttcaatcaaatctatcttggattggacttcttttaaccaggaaagaattgttgatgttgcaggtccaggtggatggaatgaccctgatatgcttgtcatagggaactttgggctatcatgggaccaacaagttacacaaatggctttgtgggcgatcatggccggccccctattcatgtctaatgatctacgtgcgatatcaccccaagcaaaggctttacttcaagataaggatgtcatagcgatcaaccaagatcctcttggtaaacaaggttatcaattgagaaaaggtgacaactttgaagtgtgggaaagaccattgtctggagatgcgtgggctgttgctattatcaaccgtcaagagatcggagggccaagatcttacactatcccggtagcctctttgggtaagggtgttgcgtgcaatcctgcctgcttcattacacaattgcttccagttaagagacaattgggtttctatgaagcaacctctaggctaagaagtcacattaatcctactggtacggtattgttgcaattggagaacacaatgcaaacctctttgaaagatttgtta

SEQ ID NO: 16 - protein, 398 aa, Artificial Sequence
  variant of human alpha-galactosidase A
LDNGLARTPPMGWLHWERFMCNLDCQEEPDSCISEKLFEEMAERMVTEGWKDAGYEYLCIDDCWMAPQRDSEGRLQADPQRFPHGIRQLANHVHSKGLKLGIYADVGNKTCAGFPGSFGYYDIDAQTFADWGVDLLKFDGCYCDSLENLADGYKHMSLALNRTGRPIVYSCEWPLYMWPFQKPNYTEIRQYCNHWRNFADIDDSWASIKSILDWTSFNQERIVDVAGPGGWNDPDMLVIGNFGLSWDQQVTQMALWAIMAGPLFMSNDLRAISPQAKALLQDKDVIAINQDPLGKQGYQLRKGDNFEVWERPLSGDAWAVAIINRQEIGGPRSYTIPVASLGKGVACNPACFITQLLPVKRQLGFYEATSRLRSHINPTGTVLLQLENTMQTSLKDLL

SEQ ID NO: 17 - DNA, 1194 bp, Artificial Sequence
  variant of human alpha-galactosidase A
ttggataacgggttagcccgtacacctccgatgggttggcttcactgggaaagattcatgtgtaacttagattgccaagaagagcctgacagctgtatctcagagaaactattcgaagagatggctgaacggatggtaaccgaaggatggaaggatgctggttatgaatacctatgtattgatgattgctggatggctccacagcgtgattcagaaggtaggttacaagctgacccccagagattcccacatggcatacgtcagcttgcaaaccatgtacacagcaaaggtctaaagttaggcatctacgctgatgtcggaaacaagacatgtgctggtttcccaggttcattcggttactatgacatagatgcgcagacgtttgctgattggggtgttgatttgttgaagtttgatggatgctactgcgattccctggagaacctagccgatgggtacaaacacatgagtttggctctaaacaggactggtaggccgatcgtctatagttgtgaatggcccttgtacatgtggccgtttcagaagccaaactacactgagataagacaatactgtaaccattggcgtaactttgctgacatagatgattcatgggcttcaatcaaatctatcttggattggacttctcgtaaccaggaaagaattgttgatgttgcaggtccaggtggatggaatgaccctgatatgcttgtcatagggaactttgggctatcatgggaccaacaagttacacaaatggctttgtgggcgatcatggccggccccctattcatgtctaatgatctacgtgcgatatcaccccaagcaaaggctttacttcaagataaggatgtcatagcgatcaaccaagatcctcttggtaaacaaggttatcaattgagaaaaggtgacaactttgaagtgtgggaaagaccattgtctggagatgcgtgggctgttgctatgatcaaccgtcaagagatcggagggccaagatcttacactatcgcggtagcctctttgggtaagggtgttgcgtgcaatcctgcctgcttcattacacaattgcttccagttaagagacaattgggtttctatgaagcaacctctaggctaaaaagtcacattaatcctactggtacggtattgttgcaattggagaacacaatgcaaacctctttgaaagatttgtta

SEQ ID NO: 18 - protein, 398 aa, Artificial Sequence
  variant of human alpha-galactosidase A
LDNGLARTPPMGWLHWERFMCNLDCQEEPDSCISEKLFEEMAERMVTEGWKDAGYEYLCIDDCWMAPQRDSEGRLQADPQRFPHGIRQLANHVHSKGLKLGIYADVGNKTCAGFPGSFGYYDIDAQTFADWGVDLLKFDGCYCDSLENLADGYKHMSLALNRTGRPIVYSCEWPLYMWPFQKPNYTEIRQYCNHWRNFADIDDSWASIKSILDWTSRNQERIVDVAGPGGWNDPDMLVIGNFGLSWDQQVTQMALWAIMAGPLFMSNDLRAISPQAKALLQDKDVIAINQDPLGKQGYQLRKGDNFEVWERPLSGDAWAVAMINRQEIGGPRSYTIAVASLGKGVACNPACFITQLLPVKRQLGFYEATSRLKSHINPTGTVLLQLENTMQTSLKDLL

SEQ ID NO: 19 - DNA, 1194 bp, Artificial Sequence
  variant of human alpha-galactosidase A
ttggataacgggttagcccgtacacctccgatgggttggcttcactgggaaagattcatgtgtaacttagattgccaagaagagcctgacagctgtatctcagagaaactattcgaagagatggctgaactgatggtaaccgaaggatggaaggatgctggttatgaatacctatgtattgatgattgctggatggctccacagcgtgattcagaaggtaggttacaagctgacccccagagattcccacatggcatacgtcagcttgcaaaccatgtacacagcaaaggtctaaagttaggcatctacgctgatgtcggaaacaagacatgtgctggtttcccaggttcattcggttactatgacatagatgcgcagacgtttgctgattggggtgttgatttgttgaagtttgatggatgctactgcgattccctggagaacctagccgatgggtacaaacacatgagtttggctctaaacaggactggtaggccgatcgtctatagttgtgaatggcccttgtacatgtggccgtttcagaagccaaactacactgagataagacaatactgtaaccattggcgtaactttgctgacatagatgattcatgggcttcaatcaaatctatcttggattggacttctcgtaaccaggaaagaattgttgatgttgcaggtccaggtggatggaatgaccctgatatgcttgtcatagggaactttgggctatcatggaaccaacaagttacacaaatggctttgtgggcgatcatggccggccccctattcatgtctaatgatctacgtgcgatatcaccccaagcaaaggctttacttcaagataaggatgtcatagcgatcaaccaagatcctcttggtaaacaaggttatcaattgagacaaggtgacaactttgaagtgtgggaaagaccattgtctggagatgcgtgggctgttgctatgatcaaccgtcaagagatcggagggccaagatcttacactatcccggtagcctctttgggtaagggtgttgcgtgcaatcctgcctgcttcattacacaattgcttccagttaagagacaattgggtttctatgaagcaacctctaggctaaaaagtcacattaatcctactggtacggtattgttgcaattggagaacacaatgcaaacctctttgaaagatttgtta

SEQ ID NO: 20 - protein, 398 aa, Artificial Sequence
  variant of human alpha-galactosidase A
LDNGLARTPPMGWLHWERFMCNLDCQEEPDSCISEKLFEEMAELMVTEGWKDAGYEYLCIDDCWMAPQRDSEGRLQADPQRFPHGIRQLANHVHSKGLKLGIYADVGNKTCAGFPGSFGYYDIDAQTFADWGVDLLKFDGCYCDSLENLADGYKHMSLALNRTGRPIVYSCEWPLYMWPFQKPNYTEIRQYCNHWRNFADIDDSWASIKSILDWTSRNQERIVDVAGPGGWNDPDMLVIGNFGLSWNQQVTQMALWAIMAGPLFMSNDLRAISPQAKALLQDKDVIAINQDPLGKQGYQLRQGDNFEVWERPLSGDAWAVAMINRQEIGGPRSYTIPVASLGKGVACNPACFITQLLPVKRQLGFYEATSRLKSHINPTGTVLLQLENTMQTSLKDLL

SEQ ID NO: 21 - DNA, 1194 bp, Artificial Sequence
  variant of human alpha-galactosidase A
ttggataacgggttagcccgtacacctccgatgggttggcttcactgggaaagattcatgtgtaacttagattgccaagaagagcctgacagctgtatctcagagaaactattcgaagagatggctgaacggatggtaaccgaaggatggaaggatgctggttatgaatacctatgtattgatgattgctggatggctccacagcgtgattcagaaggtaggttacaagctgacccccagagattcccacatggcatacgtcagcttgcaaaccatgtacacagcaaaggtctaaagttaggcatctacgctgatgtcggaaacaagacatgtgctggtttcccaggttcattcggttactatgacatagatgcgcagacgtttgctgattggggtgttgatttgttgaagtttgatggatgctactgcgattccctggagaacctagccgatgggtacaaacacatgagtttggctctaaacaggactggtaggccgatcgtctatagttgtgaatggcccttgtacatgtggccgtttcagaagccaaactacactgagataagacaatactgtaaccattggcgtaactttgctgacatagatgattcatgggcttcaatcaaatctatcttggattggacttctcgtaaccaggaaagaattgttgatgttgcaggtccaggtggatggaatgaccctgatatgcttgtcatagggaactttgggctatcatgggaccaacaagttacacaaatggctttgtgggcgatcatggccggccccctattcatgtctaatgatctacgtgcgatatcaccccaagcaaaggctttacttcaagataaggatgtcatagcgatcaaccaagatcctcttggtaaacaaggttatcaattgagacaaggtgacaactttgaagtgtgggaaagaccattgtctggagatgcgtgggctgttgctatgatcaaccgtcaagagatcggagggccaagatcttacactatcccggtagcctctttgggtaagggtgttgcgtgcaatcctgcctgcttcattacacaattgcttccagttaagagaaaattgggtttctatgaagcaacctctaggctaagaagtcacattaatcctactggtacggtattgttgcaattggagaacacaatgcaaacctctttgaaagatttgtta

SEQ ID NO: 22 - protein, 398 aa, Artificial Sequence
  variant of human alpha-galactosidase A
LDNGLARTPPMGWLHWERFMCNLDCQEEPDSCISEKLFEEMAERMVTEGWKDAGYEYLCIDDCWMAPQRDSEGRLQADPQRFPHGIRQLANHVHSKGLKLGIYADVGNKTCAGFPGSFGYYDIDAQTFADWGVDLLKFDGCYCDSLENLADGYKHMSLALNRTGRPIVYSCEWPLYMWPFQKPNYTEIRQYCNHWRNFADIDDSWASIKSILDWTSRNQERIVDVAGPGGWNDPDMLVIGNFGLSWDQQVTQMALWAIMAGPLFMSNDLRAISPQAKALLQDKDVIAINQDPLGKQGYQLRQGDNFEVWERPLSGDAWAVAMINRQEIGGPRSYTIPVASLGKGVACNPACFITQLLPVKRKLGFYEATSRLRSHINPTGTVLLQLENTMQTSLKDLL

SEQ ID NO: 23 - DNA, 1194 bp, Artificial Sequence
  variant of human alpha-galactosidase A
ttggataacgggttagcccgtacacctccgatgggttggcttcactgggaaagattcatgtgtaacttagattgccaagaagagcctgacagctgtatctcagagaaactattcgaagagatggctgaacggatggtaaccgaaggatggaaggatgctggttatgaatacctatgtattgatgattgctggatggctccacagcgtgattcagaaggtaggttacaagctgacccccagagattcccacatggcatacgtcagcttgcaaaccatgtacacagcaaaggtctaaagttaggcatctacgctgatgtcggaaacaagacatgtgctggtttcccaggttcattcggttactatgacatagatgcgcagacgtttgctgattggggtgttgatttgttgaagtttgatggatgctactgcgattccctggagaacctagccgatgggtacaaacacatgagtttggctctaaacaggactggtaggccgatcgtctatagttgtgaatggcccttgtacatgtggccgtttcagaagccaaactacactgagataagacaatactgtaaccattggcgtaactttgctgacatagatgattcatgggcttcaatcaaatctatcttggattggacttctcgtaaccaggaaagaattgttgatgttgcaggtccaggtggatggaatgaccctgatatgcttgtcatagggaactttgggctatcatgggaccaacaagttacacaaatggctttgtgggcgatcatggccggccccctattcatgtctaatgatctacgtgcgatatcaccccaagcaaaggctttacttcaagataaggatgtcatagcgatcaaccaagatcctcttggtaaacaaggttatcaattgagaaaaggtgacaactttgaagtgtgggaaagaccattgtctggagatgcgtgggctgttgctatgatcaaccgtcaagagatcggagggccaagatcttacactatcccggtagcctctttgggtaagggtgttgcgtgcaatcctgcctgcttcattacacaattgcttccagttaagagacaattgggtttctatgaagcaacctctaggctaaaaagtcacattaatcctactggtacggtattgttgcaattggagaacacaatgcaaacctctttgaaagatttgtta

SEQ ID NO: 24 - protein, 398 aa, Artificial Sequence
  variant of human alpha-galactosidase A
LDNGLARTPPMGWLHWERFMCNLDCQEEPDSCISEKLFEEMAERMVTEGWKDAGYEYLCIDDCWMAPQRDSEGRLQADPQRFPHGIRQLANHVHSKGLKLGIYADVGNKTCAGFPGSFGYYDIDAQTFADWGVDLLKFDGCYCDSLENLADGYKHMSLALNRTGRPIVYSCEWPLYMWPFQKPNYTEIRQYCNHWRNFADIDDSWASIKSILDWTSRNQERIVDVAGPGGWNDPDMLVIGNFGLSWDQQVTQMALWAIMAGPLFMSNDLRAISPQAKALLQDKDVIAINQDPLGKQGYQLRKGDNFEVWERPLSGDAWAVAMINRQEIGGPRSYTIPVASLGKGVACNPACFITQLLPVKRQLGFYEATSRLKSHINPTGTVLLQLENTMQTSLKDLL

SEQ ID NO: 25 - DNA, 1194 bp, Artificial Sequence
  variant of human alpha-galactosidase A
ttggataacgggttagcccgtacacctccgatgggttggcttcactgggaaagattcatgtgtaacttagattgccaagaagagcctgacagctgtatctcagagaaactattcgaagagatggctgaacggatggtaaccgaaggatggaaggatgctggttatgaatacctatgtattgatgattgctggatggctccacagcgtgattcagaaggtaggttacaagctgacccccagagattcccacatggcatacgtcagcttgcaaaccatgtacacagcaaaggtctaaagttaggcatctacgctgatgtcggaaacaagacatgtgctggtttcccaggttcattcggttactatgacatagatgcgcagacgtttgctgattggggtgttgatttgttgaagtttgatggatgctactgcgattccctggagaacctagccgatgggtacaaacacatgagtttggctctaaacaggactggtaggccgatcgtctatagttgtgaatggcccttgtacatgtggccgtttcagaagccaaactacactgagataagacaatactgtaaccattggcgtaactttgctgacatagatgattcatgggcttcaatcaaatctatcttggattggacttctcgtaaccaggaaagaattgttgatgttgcaggtccaggtggatggaatgaccctgatatgcttgtcatagggaactttgggctatcatgggaccaacaagttacacaaatggctttgtgggcgatcatggccggccccctattcatgtctaatgatctacgtgcgatatcaccccaagcaaaggctttacttcaagataaggatgtcatagcgatcaaccaagatcctcttggtaaacaaggttatcaattgagacaaggtgacaactttgaagtgtgggaaagaccattgtctggagacgcgtgggctgttgctattatcaaccgtcaagagatcggagggccaagatcttacactatcgcggtagcctctttgggtaagggtgttgcgtgcaatcctgcctgcttcattacacaattgcttccagttaagagacaattgggtttctatgaagcaacctctaggctaaaaagtcacattaatcctactggtacggtattgttgcaattggagaacacaatgcaaacctctttgaaagatttgtta

SEQ ID NO: 26 - protein, 398 aa, Artificial Sequence
  variant of human alpha-galactosidase A
LDNGLARTPPMGWLHWERFMCNLDCQEEPDSCISEKLFEEMAERMVTEGWKDAGYEYLCIDDCWMAPQRDSEGRLQADPQRFPHGIRQLANHVHSKGLKLGIYADVGNKTCAGFPGSFGYYDIDAQTFADWGVDLLKFDGCYCDSLENLADGYKHMSLALNRTGRPIVYSCEWPLYMWPFQKPNYTEIRQYCNHWRNFADIDDSWASIKSILDWTSRNQERIVDVAGPGGWNDPDMLVIGNFGLSWDQQVTQMALWAIMAGPLFMSNDLRAISPQAKALLQDKDVIAINQDPLGKQGYQLRQGDNFEVWERPLSGDAWAVAIINRQEIGGPRSYTIAVASLGKGVACNPACFITQLLPVKRQLGFYEATSRLKSHINPTGTVLLQLENTMQTSLKDLL

SEQ ID NO: 27 - DNA, 1194 bp, Artificial Sequence
  variant of human alpha-galactosidase A
ttggataacgggttagcccgtacacctccgatgggttggcttcactgggaaagattcatgtgtaacttagattgccaagaagagcctgacagctgtatctcagagaaactattcgaagagatggctgaactgatggtaaccgaaggatggaaggatgctggttatgaatacctatgtattgatgattgctggatggctccacagcgtgattcagaaggtaggttacaagctgacccccagagattcccacatggcatacgtcagcttgcaaaccatgtacacagcaaaggtctaaagttaggcatctacgctgatgtcggaaacaagacatgtgctggtttcccaggttcattcggttactatgacatagatgcgcagacgtttgctgattggggtgttgatttgttgaagtttgatggatgctactgcgattccctggagaacctagccgatgggtacaaacacatgagtttggctctaaacaggactggtaggccgatcgtctatagttgtgaatggcccttgtacatgtggccgtttcagaagccaaactacactgagataagacaatactgtaaccattggcgtaactttgctgacatagatgattcatgggcttcaatcaaatctatcttggattggacttcttttaaccaggaaagaattgttgatgttgcaggtccaggtggatggaatgaccctgatatgcttgtcatagggaactttgggctatcatgggaccaacaagttacacaaatggctttgtgggcgatcatggccggccccctattcatgtctaatgatctacgtgcgatatcaccccaagcaaaggctttacttcaagataaggatgtcatagcgatcaaccaagatcctcttggtaaacaaggttatcaattgagaaaaggtgacaactttgaagtgtgggaaagaccattgtctggagatgcgtgggctgttgctatgatcaaccgtcaagagatcggagggccaagatcttacactatcccggtagcctctttgggtaagggtgttgcgtgcaatcctgcctgcttcattacacaattgcttccagttaagagacaattgggtttctatgaagcaacctctaggctaaaaagtcacattaatcctactggtacggtattgttgcaattggagaacacaatgcaaacctctttgaaagatttgtta

SEQ ID NO: 28 - protein, 398 aa, Artificial Sequence
  variant of human alpha-galactosidase A
LDNGLARTPPMGWLHWERFMCNLDCQEEPDSCISEKLFEEMAELMVTEGWKDAGYEYLCIDDCWMAPQRDSEGRLQADPQRFPHGIRQLANHVHSKGLKLGIYADVGNKTCAGFPGSFGYYDIDAQTFADWGVDLLKFDGCYCDSLENLADGYKHMSLALNRTGRPIVYSCEWPLYMWPFQKPNYTEIRQYCNHWRNFADIDDSWASIKSILDWTSFNQERIVDVAGPGGWNDPDMLVIGNFGLSWDQQVTQMALWAIMAGPLFMSNDLRAISPQAKALLQDKDVIAINQDPLGKQGYQLRKGDNFEVWERPLSGDAWAVAMINRQEIGGPRSYTIPVASLGKGVACNPACFITQLLPVKRQLGFYEATSRLKSHINPTGTVLLQLENTMQTSLKDLL

SEQ ID NO: 29 - DNA, 1194 bp, Artificial Sequence
  variant of human alpha-galactosidase A
ttggataacgggttagcccgtacacctccgatgggttggcttcactgggaaagattcatgtgtaacttagattgccaagaagagcctgacagctgtatctcagagaaactattcgaagagatggctgaactgatggtaaccgaaggatggaaggatgctggttatgaatacctatgtattgatgattgctggatggctccacagcgtgattcagaaggtaggttacaagctgacccccagagattcccacatggcatacgtcagcttgcaaaccatgtacacagcaaaggtctaaagttaggcatctacgctgatgtcggaaacaagacatgtgctggtttcccaggttcattcggttactatgacatagatgcgcagacgtttgctgattggggtgttgatttgttgaagtttgatggatgctactgcgattccctggagaacctagccgatgggtacaaacacatgagtttggctctaaacaggactggtaggccgatcgtctatagttgtgaatggcccttgtacatgtggccgtttcagaagccaaactacactgagataagacaatactgtaaccattggcgtaactttgctgacatagatgattcatgggcttcaatcaaatctatcttggattggacttctcgtaaccaggaaagaattgttgatgttgcaggtccaggtggatggaatgaccctgatatgcttgtcatagggaactttgggctatcatggaaccaacaagttacacaaatggctttgtgggcgatcatggccggccccctattcatgtctaatgatctacgtgcgatatcaccccaagcaaaggctttacttcaagataaggatgtcatagcgatcaaccaagatcctcttggtaaacaaggttatcaattgagaaaaggtgacaactttgaagtgtgggaaagaccattgtctggagatgcgtgggctgttgctatgatcaaccgtcaagagatcggagggccaagatcttacactatcccggtagcctctttgggtaagggtgttgcgtgcaatcctgcctgcttcattacacaattgcttccagttaagagacaattgggtttctatgaagcaacctctaggctaaaaagtcacattaatcctactggtacggtattgttgcaattggagaacacaatgcaaacctctttgaaagatttgtta

SEQ ID NO: 30 - protein, 398 aa, Artificial Sequence
  variant of human alpha-galactosidase A
LDNGLARTPPMGWLHWERFMCNLDCQEEPDSCISEKLFEEMAELMVTEGWKDAGYEYLCIDDCWMAPQRDSEGRLQADPQRFPHGIRQLANHVHSKGLKLGIYADVGNKTCAGFPGSFGYYDIDAQTFADWGVDLLKFDGCYCDSLENLADGYKHMSLALNRTGRPIVYSCEWPLYMWPFQKPNYTEIRQYCNHWRNFADIDDSWASIKSILDWTSRNQERIVDVAGPGGWNDPDMLVIGNFGLSWNQQVTQMALWAIMAGPLFMSNDLRAISPQAKALLQDKDVIAINQDPLGKQGYQLRKGDNFEVWERPLSGDAWAVAMINRQEIGGPRSYTIPVASLGKGVACNPACFITQLLPVKRQLGFYEATSRLKSHINPTGTVLLQLENTMQTSLKDLL

SEQ ID NO: 31 - DNA, 1194 bp, Artificial Sequence
  variant of human alpha-galactosidase A
ttggataacgggttagcccgtacacctccgatgggttggcttcactgggaaagattcatgtgtaacttagattgccaagaagagcctgacagctgtatctcagagaaactattcgaagagatggctgaactgatggtaaccgaaggatggaaggatgctggttatgaatacctatgtattgatgattgctggatggctccacagcgtgattcagaaggtaggttacaagctgacccccagagattcccacatggcatacgtcagcttgcaaaccatgtacacagcaaaggtctaaagttaggcatctacgctgatgtcggaaacaagacatgtgctggtttcccaggttcattcggttactatgacatagatgcgcagacgtttgctgattggggtgttgatttgttgaagtttgatggatgctactgcgattccctggagaacctagccgatgggtacaaacacatgagtttggctctaaacaggactggtaggccgatcgtctatagttgtgaatggcccttgtacatgtggccgtttcagaagccaaactacactgagataagacaatactgtaaccattggcgtaactttgctgacatagatgattcatgggcttcaatcaaatctatcttggattggacttctcgcaaccaggaaagaattgttgatgttgcaggtccaggtggatggaatgaccctgatatgcttgtcatagggaactttgggctatcatgggaccaacaagttacacaaatggctttgtgggcgatcatggccggccccctattcatgtctaatgatctacgtgcgatatcaccccaagcaaaggctttacttcaagataaggatgtcatagcgatcaaccaagatcctcttggtaaacaaggttatcaattgagaaaaggtgacaactttgaagtgtgggaaagaccattgtctggagacgcgtgggctgttgctattatcaaccgtcaagagatcggagggccaagatcttacactatcgcggtagcctctttgggtaagggtgttgcgtgcaatcctgcctgcttcattacacaattgcttccagttaagagacaattgggtttctatgaagcaacctctaggctaaaaagtcacattaatcctactggtacggtattgttgcaattggagaacacaatgcaaacctctttgaaagatttgtta

SEQ ID NO: 32 - protein, 398 aa, Artificial Sequence
  variant of human alpha-galactosidase A
LDNGLARTPPMGWLHWERFMCNLDCQEEPDSCISEKLFEEMAELMVTEGWKDAGYEYLCIDDCWMAPQRDSEGRLQADPQRFPHGIRQLANHVHSKGLKLGIYADVGNKTCAGFPGSFGYYDIDAQTFADWGVDLLKFDGCYCDSLENLADGYKHMSLALNRTGRPIVYSCEWPLYMWPFQKPNYTEIRQYCNHWRNFADIDDSWASIKSILDWTSRNQERIVDVAGPGGWNDPDMLVIGNFGLSWDQQVTQMALWAIMAGPLFMSNDLRAISPQAKALLQDKDVIAINQDPLGKQGYQLRKGDNFEVWERPLSGDAWAVAIINRQEIGGPRSYTIAVASLGKGVACNPACFITQLLPVKRQLGFYEATSRLKSHINPTGTVLLQLENTMQTSLKDLL

SEQ ID NO: 33 - DNA, 1194 bp, Artificial Sequence
  variant of human alpha-galactosidase A
ttggataacgggttagcccgtacacctccgatgggttggcttcactgggaaagattcatgtgtaacttagattgccaagaagagcctgacagctgtatctcagagaaactattcgaagagatggctgaactgatggtaaccgaaggatggaaggatgctggttatgaatacctatgtattgatgattgctggatggctccacagcgtgattcagaaggtaggttacaagctgacccccagagattcccacatggcatacgtcagcttgcaaaccatgtacacagcaaaggtctaaagttaggcatctacgctgatgtcggaaacaagacatgtgctggtttcccaggttcattcggttactatgacatagatgcgcagacgtttgctgattggggtgttgatttgttgaagtttgatggatgctactgcgattccctggagaacctagccgatgggtacaaacacatgagtttggctctaaacaggactggtaggccgatcgtctatagttgtgaatggcccttgtacatgtggccgtttcagaagccaaactacactgagataagacaatactgtaaccattggcgtaactttgctgacatagatgattcatgggcttcaatcaaatctatcttggattggacttctcgtaaccaggaaagaattgttgatgttgcaggtccaggtggatggaatgaccctgatatgcttgtcatagggaactttgggctatcatgggaccaacaagttacacaaatggctttgtgggcgatcatggccggccccctattcatgtctaatgatctacgtgcgatatcaccccaagcaaaggctttacttcaagataaggatgtcatagcgatcaaccaagatcctcttggtaaacaaggttatcaattgagaaaaggtgacaactttgaagtgtgggaaagaccattgtctggagacgcgtgggctgttgctattatcaaccgtcaagagatcggagggccaagatcttacactatcccggtagcctctttgggtaagggtgttgcgtgcaatcctgcctgcttcattacacaattgcttccagttaagagacaattgggtttctatgaagcaacctctaggctaagaagtcacattaatcctactggtacggtattgttgcaattggagaacacaatgcaaacctctttgaaagatttgtta

SEQ ID NO: 34 - protein, 398 aa, Artificial Sequence
  variant of human alpha-galactosidase A
LDNGLARTPPMGWLHWERFMCNLDCQEEPDSCISEKLFEEMAELMVTEGWKDAGYEYLCIDDCWMAPQRDSEGRLQADPQRFPHGIRQLANHVHSKGLKLGIYADVGNKTCAGFPGSFGYYDIDAQTFADWGVDLLKFDGCYCDSLENLADGYKHMSLALNRTGRPIVYSCEWPLYMWPFQKPNYTEIRQYCNHWRNFADIDDSWASIKSILDWTSRNQERIVDVAGPGGWNDPDMLVIGNFGLSWDQQVTQMALWAIMAGPLFMSNDLRAISPQAKALLQDKDVIAINQDPLGKQGYQLRKGDNFEVWERPLSGDAWAVAIINRQEIGGPRSYTIPVASLGKGVACNPACFITQLLPVKRQLGFYEATSRLRSHINPTGTVLLQLENTMQTSLKDLL

SEQ ID NO: 35 - DNA, 1194 bp, Artificial Sequence
  variant of human alpha-galactosidase A
ttggataacgggttagcccgtacacctccgatgggttggcttcactgggaaagattcatgtgtaacttagattgccaagaagagcctgacagctgtatctcagagaaactattcgaagagatggctgaactgatggtaaccgaaggatggaaggatgctggttatgaatacctatgtattgatgattgctggatggctccacagcgtgattcagaaggtaggttacaagctgacccccagagattcccacatggcatacgtcagcttgcaaaccatgtacacagcaaaggtctaaagttaggcatctacgctgatgtcggaaacaagacatgtgctggtttcccaggttcattcggttactatgacatagatgcgcagacgtttgctgattggggtgttgatttgttgaagtttgatggatgctactgcgattccctggagaacctagccgatgggtacaaacacatgagtttggctctaaacaggactggtaggccgatcgtctatagttgtgaatggcccttgtacatgtggccgtttcagaagccaaactacactgagataagacaatactgtaaccattggcgtaactttgctgacatagatgattcatgggcttcaatcaaatctatcttggattggacttctcgtaaccaggaaagaattgttgatgttgcaggtccaggtggatggaatgaccctgatatgcttgtcatagggaactttgggctatcatggaaccaacaagttacacaaatggctttgtgggcgatcatggccggccccctattcatgtctaatgatctacgtgcgatatcaccccaagcaaaggctttacttcaagataaggatgtcatagcgatcaaccaagatcctcttggtaaacaaggttatcaattgagaaaaggtgacaactttgaagtgtgggaaagaccattgtctggagatgcgtgggctgttgctattatcaaccgtcaagagatcggagggccaagatcttacactatcccggtagcctctttgggtaagggtgttgcgtgcaatcctgcctgcttcattacacaattgcttccagttaagagacaattgggtttctatgaagcaacctctaggctaaaaagtcacattaatcctactggtacggtattgttgcaattggagaacacaatgcaaacctctttgaaagatttgtta

SEQ ID NO: 36 - protein, 398 aa, Artificial Sequence
  variant of human alpha-galactosidase A
LDNGLARTPPMGWLHWERFMCNLDCQEEPDSCISEKLFEEMAELMVTEGWKDAGYEYLCIDDCWMAPQRDSEGRLQADPQRFPHGIRQLANHVHSKGLKLGIYADVGNKTCAGFPGSFGYYDIDAQTFADWGVDLLKFDGCYCDSLENLADGYKHMSLALNRTGRPIVYSCEWPLYMWPFQKPNYTEIRQYCNHWRNFADIDDSWASIKSILDWTSRNQERIVDVAGPGGWNDPDMLVIGNFGLSWNQQVTQMALWAIMAGPLFMSNDLRAISPQAKALLQDKDVIAINQDPLGKQGYQLRKGDNFEVWERPLSGDAWAVAIINRQEIGGPRSYTIPVASLGKGVACNPACFITQLLPVKRQLGFYEATSRLKSHINPTGTVLLQLENTMQTSLKDLL

SEQ ID NO: 37 - DNA, 1194 bp, Artificial Sequence
  variant of human alpha-galactosidase A
ttggataacgggttagcccgtacacctccgatgggttggcttcactgggaaagattcatgtgtaacttagattgccaagaagagcctgacagctgtatctcagagaaactattcgaagagatggctgaacggatggtaaccgaaggatggaaggatgctggttatgaatacctatgtattgatgattgctggatggctccacagcgtgattcagaaggtaggttacaagctgacccccagagattcccacatggcatacgtcagcttgcaaaccatgtacacagcaaaggtctaaagttaggcatctacgctgatgtcggaaacaagacatgtgctggtttcccaggttcattcggttactatgacatagatgcgcagacgtttgctgattggggtgttgatttgttgaagtttgatggatgctactgcgattccctggagaacctagccgatgggtacaaacacatgagtttggctctaaacaggactggtaggccgatcgtctatagttgtgaatggcccttgtacatgtggccgtttcagaagccaaactacactgagataagacaatactgtaaccattggcgtaactttgctgacatagatgattcatgggcttcaatcaaatctatcttggattggacttcttttaaccaggaaagaattgttgatgttgcaggtccaggtggatggaatgaccctgatatgcttgtcatagggaactttgggctatcatgggaccaacaagttacacaaatggctttgtgggcgatcatggccggccccctattcatgtctaatgatctacgtgcgatatcaccccaagcaaaggctttacttcaagataaggatgtcatagcgatcaaccaagatcctcttggtaaacaaggttatcaattgagaaaaggtgacaactttgaagtgtgggaaagaccattgtctggagatgcgtgggctgttgctatgatcaaccgtcaagagatcggagggccaagatcttacactatcccggtagcctctttgggtaagggtgttgcgtgcaatcctgcctgcttcattacacaattgcttccagttaagagacaattgggtttctatgaagcaacctctaggctaaaaagtcacattaatcctactggtacggtattgttgcaattggagaacacaatgcaaacctctttgaaagatttgtta

SEQ ID NO: 38 - protein, 398 aa, Artificial Sequence
  variant of human alpha-galactosidase A
LDNGLARTPPMGWLHWERFMCNLDCQEEPDSCISEKLFEEMAERMVTEGWKDAGYEYLCIDDCWMAPQRDSEGRLQADPQRFPHGIRQLANHVHSKGLKLGIYADVGNKTCAGFPGSFGYYDIDAQTFADWGVDLLKFDGCYCDSLENLADGYKHMSLALNRTGRPIVYSCEWPLYMWPFQKPNYTEIRQYCNHWRNFADIDDSWASIKSILDWTSFNQERIVDVAGPGGWNDPDMLVIGNFGLSWDQQVTQMALWAIMAGPLFMSNDLRAISPQAKALLQDKDVIAINQDPLGKQGYQLRKGDNFEVWERPLSGDAWAVAMINRQEIGGPRSYTIPVASLGKGVACNPACFITQLLPVKRQLGFYEATSRLKSHINPTGTVLLQLENTMQTSLKDLL

SEQ ID NO: 39 - DNA, 1194 bp, Artificial Sequence
  variant of human alpha-galactosidase A
ttggataacgggttagcccgtacacctccgatgggttggcttcactgggaaagattcatgtgtaacttagattgccaagaagagcctgacagctgtatctcagagaaactattcgaagagatggctgaactgatggtaaccgaaggatggaaggatgctggttatgaatacctatgtattgatgattgctggatggctccacagcgtgattcagaaggtaggttacaagctgacccccagagattcccacatggcatacgtcagcttgcaaaccatgtacacagcaaaggtctaaagttaggcatctacgctgatgtcggaaacaagacatgtgctggtttcccaggttcattcggttactatgacatagatgcgcagacgtttgctgattggggtgttgatttgttgaagtttgatggatgctactgcgattccctggagaacctagccgatgggtacaaacacatgagtttggctctaaacaggactggtaggccgatcgtctatagttgtgaatggcccttgtacatgtggccgtttcagaagccaaactacactgagataagacaatactgtaaccattggcgtaactttgctgacatagatgattcatgggcttcaatcaaatctatcttggattggacttcttttaaccaggaaagaattgttgatgttgcaggtccaggtggatggaatgaccctgatatgcttgtcatagggaactttgggctatcatgggaccaacaagttacacaaatggctttgtgggcgatcatggccggccccctattcatgtctaatgatctacgtgcgatatcaccccaagcaaaggctttacttcaagataaggatgtcatagcgatcaaccaagatcctcttggtaaacaaggttatcaattgagaaaaggtgacaactttgaagtgtgggaaagaccattgtctggattagcgtgggctgttgctattatcaaccgtcaagagatcggagggccaagatcttacactatcccggtagcctctttgggtaagggtgttgcgtgcaatcctgcctgcttcattacacaattgcttccagttaagagacaattgggtttctatgaagcaacctctaggctaaaaagtcacattaatcctactggtacggtattgttgcaattggagaacacaatgcaaacctctttgaaagatttgtta

SEQ ID NO: 40 - protein, 398 aa, Artificial Sequence
  variant of human alpha-galactosidase A
LDNGLARTPPMGWLHWERFMCNLDCQEEPDSCISEKLFEEMAELMVTEGWKDAGYEYLCIDDCWMAPQRDSEGRLQADPQRFPHGIRQLANHVHSKGLKLGIYADVGNKTCAGFPGSFGYYDIDAQTFADWGVDLLKFDGCYCDSLENLADGYKHMSLALNRTGRPIVYSCEWPLYMWPFQKPNYTEIRQYCNHWRNFADIDDSWASIKSILDWTSFNQERIVDVAGPGGWNDPDMLVIGNFGLSWDQQVTQMALWAIMAGPLFMSNDLRAISPQAKALLQDKDVIAINQDPLGKQGYQLRKGDNFEVWERPLSGLAWAVAIINRQEIGGPRSYTIPVASLGKGVACNPACFITQLLPVKRQLGFYEATSRLKSHINPTGTVLLQLENTMQTSLKDLL

SEQ ID NO: 41 - DNA, 1194 bp, Artificial Sequence
  variant of human alpha-galactosidase A
ttggataacgggttagcccgtacacctccgatgggttggcttcactgggaaagattcatgtgtaacttagattgccaagaagagcctgacagctgtatctcagagaaactattcgaagagatggctgaacggatggtaaccgaaggatggaaggatgctggttatgaatacctatgtattgatgattgctggatggctccacagcgtgattcagaaggtaggttacaagctgacccccagagattcccacatggcatacgtcagcttgcaaaccatgtacacagcaaaggtctaaagttaggcatctacgctgatgtcggaaacaagacatgtgctggtttcccaggttcattcggttactatgacatagatgcgcagacgtttgctgattggggtgttgatttgttgaagtttgatggatgctactgcgattccctggagaacctagccgatgggtacaaacacatgagtttggctctaaacaggactggtaggccgatcgtctatagttgtgaatggcccttgtacatgtggccgtttcagaagccaaactacactgagataagacaatactgtaaccattggcgtaactttgctgacatagatgattcatgggcttcaatcaaatctatcttggattggacttctcgtaaccaggaaagaattgttgatgttgcaggtccaggtggatggaatgaccctgatatgcttgtcatagggaactttgggctatcatggaaccaacaagttacacaaatggctttgtgggcgatcatggccggccccctattcatgtctaatgatctacgtgcgatatcaccccaagcaaaggctttacttcaagataaggatgtcatagcgatcaaccaagatcctcttggtaaacaaggttatcaattgagaaaaggtgacaactttgaagtgtgggaaagaccattgtctggagatgcgtgggctgttgctattatcaaccgtcaagagatcggagggccaagatcttacactatcccggtagcctctttgggtaagggtgttgcgtgcaatcctgcctgcttcattacacaattgcttccagttaagagaaaattgggtttctatgaagcaacctctaggctaaaaagtcacattaatcctactggtacggtattgttgcaattggagaacacaatgcaaacctctttgaaagatttgtta

SEQ ID NO: 42 - protein, 398 aa, Artificial Sequence
  variant of human alpha-galactosidase A
LDNGLARTPPMGWLHWERFMCNLDCQEEPDSCISEKLFEEMAERMVTEGWKDAGYEYLCIDDCWMAPQRDSEGRLQADPQRFPHGIRQLANHVHSKGLKLGIYADVGNKTCAGFPGSFGYYDIDAQTFADWGVDLLKFDGCYCDSLENLADGYKHMSLALNRTGRPIVYSCEWPLYMWPFQKPNYTEIRQYCNHWRNFADIDDSWASIKSILDWTSRNQERIVDVAGPGGWNDPDMLVIGNFGLSWNQQVTQMALWAIMAGPLFMSNDLRAISPQAKALLQDKDVIAINQDPLGKQGYQLRKGDNFEVWERPLSGDAWAVAIINRQEIGGPRSYTIPVASLGKGVACNPACFITQLLPVKRKLGFYEATSRLKSHINPTGTVLLQLENTMQTSLKDLL

SEQ ID NO: 43 - DNA, 1194 bp, Artificial Sequence
  variant of human alpha-galactosidase A
ttggataacgggttagcccgtacacctccgatgggttggcttcactgggaaagattcatgtgtaacttagattgccaagaagagcctgacagctgtatctcagagaaactattcgaagagatggctgaactgatggtaaccgaaggatggaaggatgctggttatgaatacctatgtattgatgattgctggatggctccacagcgtgattcagaaggtaggttacaagctgacccccagagattcccacatggcatacgtcagcttgcaaaccatgtacacagcaaaggtctaaagttaggcatctacgctgatgtcggaaacaagacatgtgctggtttcccaggttcattcggttactatgacatagatgcgcagacgtttgctgattggggtgttgatttgttgaagtttgatggatgctactgcgattccctggagaacctagccgatgggtacaaacacatgagtttggctctaaacaggactggtaggccgatcgtctatagttgtgaatggcccttgtacatgtggccgtttcagaagccaaactacactgagataagacaatactgtaaccattggcgtaactttgctgacatagatgattcatgggcttcaatcaaatctatcttggattggacttcttttaaccaggaaagaattgttgatgttgcaggtccaggtggatggaatgaccctgatatgcttgtcatagggaactttgggctatcatgggaccaacaagttacacaaatggctttgtgggcgatcatggccggccccctattcatgtctaatgatctacgtgcgatatcaccccaagcaaaggctttacttcaagataaggatgtcatagcgatcaaccaagatcctcttggtaaacaaggttatcaattgagaaaaggtgacaactttgaagtgtgggaaagaccattgtctggagatgcgtgggctgttgctattatcaaccgtcaagagatcggagggccaagatcttacactatcccggtagcctctttgggtaagggtgttgcgtgcaatcctgcctgcttcattacacaattgcttccagttaagagacaattgggtttctatgaagcaacctctaggctaaaaagtcacattaatcctactggtacggtattgttgcaattggagaacacaatgcaaacctctttgaaagatttgtta

SEQ ID NO: 44 - protein, 398 aa, Artificial Sequence
  variant of human alpha-galactosidase A
LDNGLARTPPMGWLHWERFMCNLDCQEEPDSCISEKLFEEMAELMVTEGWKDAGYEYLCIDDCWMAPQRDSEGRLQADPQRFPHGIRQLANHVHSKGLKLGIYADVGNKTCAGFPGSFGYYDIDAQTFADWGVDLLKFDGCYCDSLENLADGYKHMSLALNRTGRPIVYSCEWPLYMWPFQKPNYTEIRQYCNHWRNFADIDDSWASIKSILDWTSFNQERIVDVAGPGGWNDPDMLVIGNFGLSWDQQVTQMALWAIMAGPLFMSNDLRAISPQAKALLQDKDVIAINQDPLGKQGYQLRKGDNFEVWERPLSGDAWAVAIINRQEIGGPRSYTIPVASLGKGVACNPACFITQLLPVKRQLGFYEATSRLKSHINPTGTVLLQLENTMQTSLKDLL

SEQ ID NO: 45 - DNA, 1194 bp, Artificial Sequence
  variant of human alpha-galactosidase A
ttggataacgggttagcccgtacacctccgatgggttggcttcactgggaaagattcatgtgtaacttagattgccaagaagagcctgacagctgtatctcagagaaactattcgaagagatggctgaacggatggtaaccgaaggatggaaggatgctggttatgaatacctatgtattgatgattgctggatggctccacagcgtgattcagaaggtaggttacaagctgacccccagagattcccacatggcatacgtcagcttgcaaaccatgtacacagcaaaggtctaaagttaggcatctacgctgatgtcggaaacaagacatgtgctggtttcccaggttcattcggttactatgacatagatgcgcagacgtttgctgattggggtgttgatttgttgaagtttgatggatgctactgcgattccctggagaacctagccgatgggtacaaacacatgagtttggctctaaacaggactggtaggccgatcgtctatagttgtgaatggcccttgtacatgtggccgtttcagaagccaaactacactgagataagacaatactgtaaccattggcgtaactttgctgacatagatgattcatgggcttcaatcaaatctatcttggattggacttctcgtaaccaggaaagaattgttgatgttgcaggtccaggtggatggaatgaccctgatatgcttgtcatagggaactttgggctatcatgggaccaacaagttacacaaatggctttgtgggcgatcatggccggccccctattcatgtctaatgatctacgtgcgatatcaccccaagcaaaggctttacttcaagataaggatgtcatagcgatcaaccaagatcctcttggtaaacaaggttatcaattgagaaaaggtgacaactttgaagtgtgggaaagaccattgtctggagatgcgtgggctgttgctattatcaaccgtcaagagatcggagggccaagatcttacactatcccggtagcctctttgggtaagggtgttgcgtgcaatcctgcctgcttcattacacaattgcttccagttaagagacaattgggtttctatgaagcaacctctaggctaagaagtcacattaatcctactggtacggtattgttgcaattggagaacacaatgcaaacctctttgaaagatttgtta

SEQ ID NO: 46 - protein, 398 aa, Artificial Sequence
  variant of human alpha-galactosidase A
LDNGLARTPPMGWLHWERFMCNLDCQEEPDSCISEKLFEEMAERMVTEGWKDAGYEYLCIDDCWMAPQRDSEGRLQADPQRFPHGIRQLANHVHSKGLKLGIYADVGNKTCAGFPGSFGYYDIDAQTFADWGVDLLKFDGCYCDSLENLADGYKHMSLALNRTGRPIVYSCEWPLYMWPFQKPNYTEIRQYCNHWRNFADIDDSWASIKSILDWTSRNQERIVDVAGPGGWNDPDMLVIGNFGLSWDQQVTQMALWAIMAGPLFMSNDLRAISPQAKALLQDKDVIAINQDPLGKQGYQLRKGDNFEVWERPLSGDAWAVAIINRQEIGGPRSYTIPVASLGKGVACNPACFITQLLPVKRQLGFYEATSRLRSHINPTGTVLLQLENTMQTSLKDLL

SEQ ID NO: 47 - DNA, 1194 bp, Artificial Sequence
  variant of human alpha-galactosidase A
ttggataacgggttagcccgtacacctccgatgggttggcttcactgggaaagattcatgtgtaacttagattgccaagaagagcctgacagctgtatctcagagaaactattcgaagagatggctgaacggatggtaaccgaaggatggaaggatgctggttatgaatacctatgtattgatgattgctggatggctccacagcgtgattcagaaggtaggttacaagctgacccccagagattcccacatggcatacgtcagcttgcaaaccatgtacacagcaaaggtctaaagttaggcatctacgctgatgtcggaaacaagacatgtgctggtttcccaggttcattcggttactatgacatagatgcgcagacgtttgctgattggggtgttgatttgttgaagtttgatggatgctactgcgattccctggagaacctagccgatgggtacaaacacatgagtttggctctaaacaggactggtaggccgatcgtctatagttgtgaatggcccttgtacatgtggccgtttcagaagccaaactacactgagataagacaatactgtaaccattggcgtaactttgctgacatagatgattcatgggcttcaatcaaatctatcttggattggacttctcgtaaccaggaaagaattgttgatgttgcaggtccaggtggatggaatgaccctgatatgcttgtcatagggaactttgggctatcatggaaccaacaagttacacaaatggctttgtgggcgatcatggccggccccctattcatgtctaatgatctacgtgcgatatcaccccaagcaaaggctttacttcaagataaggatgtcatagcgatcaaccaagatcctcttggtaaacaaggttatcaattgagaaaaggtgacaactttgaagtgtgggaaagaccattgtctggagacgcgtgggctgttgctatgatcaaccgtcaagagatcggagggccaagatcttacactatcccggtagcctctttgggtaagggtgttgcgtgcaatcctgcctgcttcattacacaattgcttccagttaagagacaattgggtttctatgaagcaacctctaggctaaaaagtcacattaatcctactggtacggtattgttgcaattggagaacacaatgcaaacctctttgaaagatttgtta

SEQ ID NO: 48 - protein, 398 aa, Artificial Sequence
  variant of human alpha-galactosidase A
LDNGLARTPPMGWLHWERFMCNLDCQEEPDSCISEKLFEEMAERMVTEGWKDAGYEYLCIDDCWMAPQRDSEGRLQADPQRFPHGIRQLANHVHSKGLKLGIYADVGNKTCAGFPGSFGYYDIDAQTFADWGVDLLKFDGCYCDSLENLADGYKHMSLALNRTGRPIVYSCEWPLYMWPFQKPNYTEIRQYCNHWRNFADIDDSWASIKSILDWTSRNQERIVDVAGPGGWNDPDMLVIGNFGLSWNQQVTQMALWAIMAGPLFMSNDLRAISPQAKALLQDKDVIAINQDPLGKQGYQLRKGDNFEVWERPLSGDAWAVAMINRQEIGGPRSYTIPVASLGKGVACNPACFITQLLPVKRQLGFYEATSRLKSHINPTGTVLLQLENTMQTSLKDLL

SEQ ID NO: 49 - DNA, 1194 bp, Artificial Sequence
  variant of human alpha-galactosidase A
ttggataacgggttagcccgtacacctccgatgggttggcttcactgggaaagattcatgtgtaacttagattgccaagaagagcctgacagctgtatctcagagaaactattcgaagagatggctgaactgatggtaaccgaaggatggaaggatgctggttatgaatacctatgtattgatgattgctggatggctccacagcgtgattcagaaggtaggttacaagctgacccccagagattcccacatggcatacgtcagcttgcaaaccatgtacacagcaaaggtctaaagttaggcatctacgctgatgtcggaaacaagacatgtgctggtttcccaggttcattcggttactatgacatagatgcgcagacgtttgctgattggggtgttgatttgttgaagtttgatggatgctactgcgattccctggagaacctagccgatgggtacaaacacatgagtttggctctaaacaggactggtaggccgatcgtctatagttgtgaatggcccttgtacatgtggccgtttcagaagccaaactacactgagataagacaatactgtaaccattggcgtaactttgctgacatagatgattcatgggcttcaatcaaatctatcttggattggacttctcgtaaccaggaaagaattgttgatgttgcaggtccaggtggatggaatgaccctgatatgcttgtcatagggaactttgggctatcatgggaccaacaagttacacaaatggctttgtgggcgatcatggccggccccctattcatgtctaatgatctacgtgcgatatcaccccaagcaaaggctttacttcaagataaggatgtcatagcgatcaaccaagatcctcttggtaaacaaggttatcaattgagaaaaggtgacaactttgaagtgtgggaaagaccattgtctggagatgcgtgggctgttgctattatcaaccgtcaagagatcggagggccaagatcttacactatcccggtagcctctttgggtaagggtgttgcgtgcaatcctgcctgcttcattacacaattgcttccagttaagagacaattgggtttctatgaagcaacctctaggctaaaaagtcacattaatcctactggtacggtattgttgcaattggagaacacaatgcaaacctctttgaaagatttgtta

SEQ ID NO: 50 - protein, 398 aa, Artificial Sequence
  variant of human alpha-galactosidase A
LDNGLARTPPMGWLHWERFMCNLDCQEEPDSCISEKLFEEMAELMVTEGWKDAGYEYLCIDDCWMAPQRDSEGRLQADPQRFPHGIRQLANHVHSKGLKLGIYADVGNKTCAGFPGSFGYYDIDAQTFADWGVDLLKFDGCYCDSLENLADGYKHMSLALNRTGRPIVYSCEWPLYMWPFQKPNYTEIRQYCNHWRNFADIDDSWASIKSILDWTSRNQERIVDVAGPGGWNDPDMLVIGNFGLSWDQQVTQMALWAIMAGPLFMSNDLRAISPQAKALLQDKDVIAINQDPLGKQGYQLRKGDNFEVWERPLSGDAWAVAIINRQEIGGPRSYTIPVASLGKGVACNPACFITQLLPVKRQLGFYEATSRLKSHINPTGTVLLQLENTMQTSLKDLL

SEQ ID NO: 51 - DNA, 1194 bp, Artificial Sequence
  variant of human alpha-galactosidase A
ttggataacgggttagcccgtacacctccgatgggttggcttcactgggaaagattcatgtgtaacttagattgccaagaagagcctgacagctgtatctcagagaaactattcgaagagatggctgaacggatggtaaccgaaggatggaaggatgctggttatgaatacctatgtattgatgattgctggatggctccacagcgtgattcagaaggtaggttacaagctgacccccagagattcccacatggcatacgtcagcttgcaaaccatgtacacagcaaaggtctaaagttaggcatctacgctgatgtcggaaacaagacatgtgctggtttcccaggttcattcggttactatgacatagatgcgcagacgtttgctgattggggtgttgatttgttgaagtttgatggatgctactgcgattccctggagaacctagccgatgggtacaaacacatgagtttggctctaaacaggactggtaggccgatcgtctatagttgtgaatggcccttgtacatgtggccgtttcagaagccaaactacactgagataagacaatactgtaaccattggcgtaactttgctgacatagatgattcatgggcttcaatcaaatctatcttggattggacttctcgtaaccaggaaagaattgttgatgttgcaggtccaggtggatggaatgaccctgatatgcttgtcatagggaactttgggctatcatgggaccaacaagttacacaaatggctttgtgggcgatcatggccggccccctattcatgtctaatgatctacgtgcgatatcaccccaagcaaaggctttacttcaagataaggatgtcatagcgatcaaccaagatcctcttggtaaacaaggttatcaattgagaaaaggtgacaactttgaagtgtgggaaagaccattgtctggattagcgtgggctgttgctattatcaaccgtcaagagatcggagggccaagatcttacactatcccggtagcctctttgggtaagggtgttgcgtgcaatcctgcctgcttcattacacaattgcttccagttaagagacaattgggtttctatgaagcaacctctaggctaaaaagtcacattaatcctactggtacggtattgttgcaattggagaacacaatgcaaacctctttgaaagatttgtta

SEQ ID NO: 52 - protein, 398 aa, Artificial Sequence
  variant of human alpha-galactosidase A
LDNGLARTPPMGWLHWERFMCNLDCQEEPDSCISEKLFEEMAERMVTEGWKDAGYEYLCIDDCWMAPQRDSEGRLQADPQRFPHGIRQLANHVHSKGLKLGIYADVGNKTCAGFPGSFGYYDIDAQTFADWGVDLLKFDGCYCDSLENLADGYKHMSLALNRTGRPIVYSCEWPLYMWPFQKPNYTEIRQYCNHWRNFADIDDSWASIKSILDWTSRNQERIVDVAGPGGWNDPDMLVIGNFGLSWDQQVTQMALWAIMAGPLFMSNDLRAISPQAKALLQDKDVIAINQDPLGKQGYQLRKGDNFEVWERPLSGLAWAVAIINRQEIGGPRSYTIPVASLGKGVACNPACFITQLLPVKRQLGFYEATSRLKSHINPTGTVLLQLENTMQTSLKDLL

SEQ ID NO: 53 - DNA, 1194 bp, Artificial Sequence
  variant of human alpha-galactosidase A
ttggataacgggttagcccgtacacctccgatgggttggcttcactgggaaagattcatgtgtaacttagattgccaagaagagcctgacagctgtatctcagagaaactattcgaagagatggctgaactgatggtaaccgaaggatggaaggatgctggttatgaatacctatgtattgatgattgctggatggctccacagcgtgattcagaaggtaggttacaagctgacccccagagattcccacatggcatacgtcagcttgcaaaccatgtacacagcaaaggtctaaagttaggcatctacgctgatgtcggaaacaagacatgtgctggtttcccaggttcattcggttactatgacatagatgcgcagacgtttgctgattggggtgttgatttgttgaagtttgatggatgctactgcgattccctggagaacctagccgatgggtacaaacacatgagtttggctctaaacaggactggtaggccgatcgtctatagttgtgaatggcccttgtacatgtggccgtttcagaagccaaactacactgagataagacaatactgtaaccattggcgtaactttgctgacatagatgattcatgggcttcaatcaaatctatcttggattggacttctcgtaaccaggaaagaattgttgatgttgcaggtccaggtggatggaatgaccctgatatgcttgtcatagggaactttgggctatcatggaaccaacaagttacacaaatggctttgtgggcgatcatggccggccccctattcatgtctaatgatctacgtgcgatatcaccccaagcaaaggctttacttcaagataaggatgtcatagcgatcaaccaagatcctcttggtaaacaaggttatcaattgagaaaaggtgacaactttgaagtgtgggaaagaccattgtctggagatgcgtgggctgttgctattatcaaccgtcaagagatcggagggccaagatcttacactatcccggtagcctctttgggtaagggtgttgcgtgcaatcctgcctgcttcattacacaattgcttccagttaagagaaaattgggtttctatgaagcaacctctaggctaaaaagtcacattaatcctactggtacggtattgttgcaattggagaacacaatgcaaacctctttgaaagatttgtta

SEQ ID NO: 54 - protein, 398 aa, Artificial Sequence
  variant of human alpha-galactosidase A
LDNGLARTPPMGWLHWERFMCNLDCQEEPDSCISEKLFEEMAELMVTEGWKDAGYEYLCIDDCWMAPQRDSEGRLQADPQRFPHGIRQLANHVHSKGLKLGIYADVGNKTCAGFPGSFGYYDIDAQTFADWGVDLLKFDGCYCDSLENLADGYKHMSLALNRTGRPIVYSCEWPLYMWPFQKPNYTEIRQYCNHWRNFADIDDSWASIKSILDWTSRNQERIVDVAGPGGWNDPDMLVIGNFGLSWNQQVTQMALWAIMAGPLFMSNDLRAISPQAKALLQDKDVIAINQDPLGKQGYQLRKGDNFEVWERPLSGDAWAVAIINRQEIGGPRSYTIPVASLGKGVACNPACFITQLLPVKRKLGFYEATSRLKSHINPTGTVLLQLENTMQTSLKDLL

SEQ ID NO: 55 - DNA, 1194 bp, Artificial Sequence
  variant of human alpha-galactosidase A
ttggataacgggttagcccgtacacctccgatgggttggcttcactgggaaagattcatgtgtaacttagattgccaagaagagcctgacagctgtatctcagagaaactattcgaagagatggctgaacggatggtaaccgaaggatggaaggatgctggttatgaatacctatgtattgatgattgctggatggctccacagcgtgattcagaaggtaggttacaagctgacccccagagattcccacatggcatacgtcagcttgcaaaccatgtacacagcaaaggtctaaagttaggcatctacgctgatgtcggaaacaagacatgtgctggtttcccaggttcattcggttactatgacatagatgcgcagacgtttgctgattggggtgttgatttgttgaagtttgatggatgctactgcgattccctggagaacctagccgatgggtacaaacacatgagtttggctctaaacaggactggtaggccgatcgtctatagttgtgaatggcccttgtacatgtggccgtttcagaagccaaactacactgagataagacaatactgtaaccattggcgtaactttgctgacatagatgattcatgggcttcaatcaaatctatcttggattggacttctcgtaaccaggaaagaattgttgatgttgcaggtccaggtggatggaatgaccctgatatgcttgtcatagggaactttgggctatcatgggaccaacaagttacacaaatggctttgtgggcgatcatggccggccccctattcatgtctaatgatctacgtgcgatatcaccccaagcaaaggctttacttcaagataaggatgtcatagcgatcaaccaagatcctcttggtaaacaaggttatcaattgagaaaaggtgacaactttgaagtgtgggaaagaccattgtctggattagcgtgggctgttgctattatcaaccgtcaagagatcggagggccaagatcttacactatcgcggtagcctctttgggtaagggtgttgcgtgcaatcctgcctgcttcattacacaattgcttccagttaagagacaattgggtttctatgaagcaacctctaggctaaaaagtcacattaatcctactggtacggtattgttgcaattggagaacacaatgcaaacctctttgaaagatttgtta

SEQ ID NO: 56 - protein, 398 aa, Artificial Sequence
  variant of human alpha-galactosidase A
LDNGLARTPPMGWLHWERFMCNLDCQEEPDSCISEKLFEEMAERMVTEGWKDAGYEYLCIDDCWMAPQRDSEGRLQADPQRFPHGIRQLANHVHSKGLKLGIYADVGNKTCAGFPGSFGYYDIDAQTFADWGVDLLKFDGCYCDSLENLADGYKHMSLALNRTGRPIVYSCEWPLYMWPFQKPNYTEIRQYCNHWRNFADIDDSWASIKSILDWTSRNQERIVDVAGPGGWNDPDMLVIGNFGLSWDQQVTQMALWAIMAGPLFMSNDLRAISPQAKALLQDKDVIAINQDPLGKQGYQLRKGDNFEVWERPLSGLAWAVAIINRQEIGGPRSYTIAVASLGKGVACNPACFITQLLPVKRQLGFYEATSRLKSHINPTGTVLLQLENTMQTSLKDLL

SEQ ID NO: 57 - DNA, 1194 bp, Artificial Sequence
  variant of human alpha-galactosidase A
ttggataacgggttagcccgtacacctccgatgggttggcttcactgggaaagattcatgtgtaacttagattgccaagaagagcctgacagctgtatctcagagaaactattcgaagagatggctgaacggatggtaaccgaaggatggaaggatgctggttatgaatacctatgtattgatgattgctggatggctccacagcgtgattcagaaggtaggttacaagctgacccccagagattcccacatggcatacgtcagcttgcaaaccatgtacacagcaaaggtctaaagttaggcatctacgctgatgtcggaaacaagacatgtgctggtttcccaggttcattcggttactatgacatagatgcgcagacgtttgctgattggggtgttgatttgttgaagtttgatggatgctactgcgattccctggagaacctagccgatgggtacaaacacatgagtttggctctaaacaggactggtaggccgatcgtctatagttgtgaatggcccttgtacatgtggccgtttcagaagccaaactacactgagataagacaatactgtaaccattggcgtaactttgctgacatagatgattcatgggcttcaatcaaatctatcttggattggacttctcgtaaccaggaaagaattgttgatgttgcaggtccaggtggatggaatgaccctgatatgcttgtcatagggaactttgggctatcatgggaccaacaagttacacaaatggctttgtgggcgatcatggccggccccctattcatgtctaatgatctacgtgcgatatcaccccaagcaaaggctttacttcaagataaggatgtcatagcgatcaaccaagatcctcttggtaaacaaggttatcaattgagaaaaggtgacaactttgaagtgtgggaaagaccattgtctggagacgcgtgggctgttgctattatcaaccgtcaagagatcggagggccaagatcttacactatcccggtagcctctttgggtaagggtgttgcgtgcaatcctgcctgcttcattacacaattgcttccagttaagagaaaattgggtttctatgaagcaacctctaggctaagaagtcacattaatcctactggtacggtattgttgcaattggagaacacaatgcaaacctctttgaaagatttgtta

SEQ ID NO: 58 - protein, 398 aa, Artificial Sequence
  variant of human alpha-galactosidase A
LDNGLARTPPMGWLHWERFMCNLDCQEEPDSCISEKLFEEMAERMVTEGWKDAGYEYLCIDDCWMAPQRDSEGRLQADPQRFPHGIRQLANHVHSKGLKLGIYADVGNKTCAGFPGSFGYYDIDAQTFADWGVDLLKFDGCYCDSLENLADGYKHMSLALNRTGRPIVYSCEWPLYMWPFQKPNYTEIRQYCNHWRNFADIDDSWASIKSILDWTSRNQERIVDVAGPGGWNDPDMLVIGNFGLSWDQQVTQMALWAIMAGPLFMSNDLRAISPQAKALLQDKDVIAINQDPLGKQGYQLRKGDNFEVWERPLSGDAWAVAIINRQEIGGPRSYTIPVASLGKGVACNPACFITQLLPVKRKLGFYEATSRLRSHINPTGTVLLQLENTMQTSLKDLL

SEQ ID NO: 59 - DNA, 1194 bp, Artificial Sequence
  variant of human alpha-galactosidase A
ttggataacgggttagcccgtacacctccgatgggttggcttcactgggaaagattcatgtgtaacttagattgccaagaagagcctgacagctgtatctcagagaaactattcgaagagatggctgaactgatggtaaccgaaggatggaaggatgctggttatgaatacctatgtattgatgattgctggatggctccacagcgtgattcagaaggtaggttacaagctgacccccagagattcccacatggcatacgtcagcttgcaaaccatgtacacagcaaaggtctaaagttaggcatctacgctgatgtcggaaacaagacatgtgctggtttcccaggttcattcggttactatgacatagatgcgcagacgtttgctgattggggtgttgatttgttgaagtttgatggatgctactgcgattccctggagaacctagccgatgggtacaaacacatgagtttggctctaaacaggactggtaggccgatcgtctatagttgtgaatggcccttgtacatgtggccgtttcagaagccaaactacactgagataagacaatactgtaaccattggcgtaactttgctgacatagatgattcatgggcttcaatcaaatctatcttggattggacttcttttaaccaggaaagaattgttgatgttgcaggtccaggtggatggaatgaccctgatatgcttgtcatagggaactttgggctatcatgggaccaacaagttacacaaatggctttgtgggcgatcatggccggccccctattcatgtctaatgatctacgtgcgatatcaccccaagcaaaggctttacttcaagataaggatgtcatagcgatcaaccaagatcctcttggtaaacaaggttatcaattgagaaaaggtgacaactttgaagtgtgggaaagaccattgtctggagatgcgtgggctgttgctatgatcaaccgtcaagagatcggagggccaagatcttacactatcgcggtagcctctttgggtaagggtgttgcgtgcaatcctgcctgcttcattacacaattgcttccagttaagagacaattgggtttctatgaagcaacctctaggctaaaaagtcacattaatcctactggtacggtattgttgcaattggagaacacaatgcaaacctctttgaaagatttgtta

SEQ ID NO: 60 - protein, 398 aa, Artificial Sequence
  variant of human alpha-galactosidase A
LDNGLARTPPMGWLHWERFMCNLDCQEEPDSCISEKLFEEMAELMVTEGWKDAGYEYLCIDDCWMAPQRDSEGRLQADPQRFPHGIRQLANHVHSKGLKLGIYADVGNKTCAGFPGSFGYYDIDAQTFADWGVDLLKFDGCYCDSLENLADGYKHMSLALNRTGRPIVYSCEWPLYMWPFQKPNYTEIRQYCNHWRNFADIDDSWASIKSILDWTSFNQERIVDVAGPGGWNDPDMLVIGNFGLSWDQQVTQMALWAIMAGPLFMSNDLRAISPQAKALLQDKDVIAINQDPLGKQGYQLRKGDNFEVWERPLSGDAWAVAMINRQEIGGPRSYTIAVASLGKGVACNPACFITQLLPVKRQLGFYEATSRLKSHINPTGTVLLQLENTMQTSLKDLL

SEQ ID NO: 61 - DNA, 1194 bp, Artificial Sequence
  variant of human alpha-galactosidase A
ttggataacgggttagcccgtacacctccgatgggttggcttcactgggaaagattcatgtgtaacttagattgccaagaagagcctgacagctgtatctcagagaaactattcgaagagatggctgaacggatggtaaccgaaggatggaaggatgctggttatgaatacctatgtattgatgattgctggatggctccacagcgtgattcagaaggtaggttacaagctgacccccagagattcccacatggcatacgtcagcttgcaaaccatgtacacagcaaaggtctaaagttaggcatctacgctgatgtcggaaacaagacatgtgctggtttcccaggttcattcggttactatgacatagatgcgcagacgtttgctgattggggtgttgatttgttgaagtttgatggatgctactgcgattccctggagaacctagccgatgggtacaaacacatgagtttggctctaaacaggactggtagggcgatcgtctatagttgtgaatggcccttgtacatgtggccgtttcagaagccaaactacactgagataagacaatactgtaaccattggcgtaactttgctgacatagatgattcatgggcttcaatcaaatctatcttggattggacttctcgtaaccaggaaagaattgttgatgttgcaggtccaggtggatggaatgaccctgatatgcttgtcatagggaactttgggctatcatgggaccaacaagttacacaaatggctttgtgggcgatcatggccggccccctattcatgtctaatgatctacgtgcgatatcaccccaagcaaaggctttacttcaagataaggatgtcatagcgatcaaccaagatcctcttggtaaacaaggttatcaattgagaaaaggtgacaactttgaagtgtgggaaagaccattgtctggagatgcgtgggctgttgctattatcaaccgtcaagagatcggagggccaagatcttacactatcccggtagcctctttgggtaagggtgttgcgtgcaatcctgcctgcttcattacacaattgcttccagttaagagaaaattgggtttctatgaagcaacctctaggctaaaaagtcacattaatcctactggtacggtattgttgcaattggagaacacaatgcaaacctctttgaaagatttgtta

SEQ ID NO: 62 - protein, 398 aa, Artificial Sequence
  variant of human alpha-galactosidase A
LDNGLARTPPMGWLHWERFMCNLDCQEEPDSCISEKLFEEMAERMVTEGWKDAGYEYLCIDDCWMAPQRDSEGRLQADPQRFPHGIRQLANHVHSKGLKLGIYADVGNKTCAGFPGSFGYYDIDAQTFADWGVDLLKFDGCYCDSLENLADGYKHMSLALNRTGRAIVYSCEWPLYMWPFQKPNYTEIRQYCNHWRNFADIDDSWASIKSILDWTSRNQERIVDVAGPGGWNDPDMLVIGNFGLSWDQQVTQMALWAIMAGPLFMSNDLRAISPQAKALLQDKDVIAINQDPLGKQGYQLRKGDNFEVWERPLSGDAWAVAIINRQEIGGPRSYTIPVASLGKGVACNPACFITQLLPVKRKLGFYEATSRLKSHINPTGTVLLQLENTMQTSLKDLL

SEQ ID NO: 63 - DNA, 100 bp, Artificial Sequence
  BamHI-pCDNA-GLA-F
acgtttggatcccgccaccatggaatggagctgggtctttctcttcttcctgtcagtaacgactggtgtccactccttggataacgggttagcccgtaca

SEQ ID NO: 64 - DNA, 35 bp, Artificial Sequence
  XhoI-pCDNA-GLA-R
attgtactcgagttataacaaatctttcaaagaca

SEQ ID NO: 65 - DNA, 57 bp, Artificial Sequence
  synthetic mouse IG signal peptide
atggaatggagctgggtctttctcttcttcctgtcagtaacgactggtgtccactcc

SEQ ID NO: 66 - protein, 19 aa, Artificial Sequence
  synthetic mouse IG signal peptide
MEWSWVFLFFLSVTTGVHS

SEQ ID NO: 67 - DNA, 1197 bp, Artificial Sequence
  variant of human alpha-galactosidase A
ttggataacgggttagccctgacacctccgatgggttggcttcactgggaaagattcatgtgtaacttagattgccaagaagagcctgacagctgtatctcagagaaactattcgaagagatggctgaacggatggtaaccgaaggatggaaggatgctggttatgaatacctatgtattgatgattgctggatggctccacagcgtgattcagaaggtaggttacaagctgacccccagagattcccacatggcatacgtcagcttgcaaaccatgtacacagcaaaggtctaaagttaggcatctacgctgatgtcggaaacaagacatgtgctggtttcccaggttcatttggtcactatgacatagatgcgcagacgtttgctgattggggtgttgatttgttgaagtttgatggatgctactgcgattccctggagaacctagccgatgggtacaaacacatgagtttggctctaaacaggactggtaggccgatcgtctatagttgtgaatggcccttgtacatgtggccgtttcagaagccaaactacactgagataagacaatactgtaaccattggcgtaactttgctgacatagatgattcatgggcttcaatcaaatctatcttggattggacttctcgtaaccaggaaagaattgttgatgttgcaggtccaggtggatggaatgaccctgatatgcttgtcatagggaactttgggctatcatgggaccaacaagttacacaaatggctttgtgggcgatcatggccggccccctattcatgtctaatgatctacgtgcgatatcaccccaagcaaaggctttacttcaagacaaggatgtcatagcgatcaaccaagatcctcttggtaaacaaggttatcaattgagaaaaggtgacaactttgaagtgtgggaaagaccattgtctggagacgcgtgggctgttgctattatcaaccgtcaagagatcggagggccaagatcttacactatcccggtagcctctttgggtaagggtgttgcgtgcaatcctgcctgcttcattacacaattgcttccagttaagagaaaattgggtttctatgaagcaacctctaggctaagaagtcacattaatcctactggtacggtattgttgcaattggagaacacaatgcaaacctctttgaaagatttgttataa

SEQ ID NO: 68 - protein, 398 aa, Artificial Sequence
  variant of human alpha-galactosidase A
LDNGLALTPPMGWLHWERFMCNLDCQEEPDSCISEKLFEEMAERMVTEGWKDAGYEYLCIDDCWMAPQRDSEGRLQADPQRFPHGIRQLANHVHSKGLKLGIYADVGNKTCAGFPGSFGHYDIDAQTFADWGVDLLKFDGCYCDSLENLADGYKHMSLALNRTGRPIVYSCEWPLYMWPFQKPNYTEIRQYCNHWRNFADIDDSWASIKSILDWTSRNQERIVDVAGPGGWNDPDMLVIGNFGLSWDQQVTQMALWAIMAGPLFMSNDLRAISPQAKALLQDKDVIAINQDPLGKQGYQLRKGDNFEVWERPLSGDAWAVAIINRQEIGGPRSYTIPVASLGKGVACNPACFITQLLPVKRKLGFYEATSRLRSHINPTGTVLLQLENTMQTSLKDLL

SEQ ID NO: 69 - DNA, 1197 bp, Artificial Sequence
  variant of human alpha-galactosidase A
ttggataacgggttagccctgacacctccgatgggttggcttcactgggaaagattcatgtgtaacttagattgccaagaagagcctgacagctgtatctcagagaaactattcgaagagatggctgaacggatggtaaccgaaggatggaaggatgctggttatgaatacctatgtattgatgattgctggatggctccacagcgtgattcagaaggtaggttacaagctgacccccagagattcccacatggcatacgtcagcttgcaaaccatgtacacagcaaaggtctaaagttaggcatctacgctgatgtcggaaacaagacatgtgctggtttcccaggttcattcggttactatgacatagatgcgcagacgtttgctgattggggtgttgatttgttgaagtttgatggatgctactgcgattccctggagaacctagccgatgggtacaaacacatgagtttggctctaaacaggactggtaggccgatcgtctatagttgtgaatggcccttgtacatgtggccgtttcagaagccaaactacactgagataagacaatactgtaaccattggcgtaactttgctgacatagatgattcatgggcttcaatcaaatctatcttggattggacttctcgtaaccaggaaagaattgttgatgttgcaggtccaggtggatggaatgaccctgatatgcttgtcatagggaactttgggctatcatgggaccaacaagttacacaaatggctttgtgggcgatcatggccggccccctattcatgtctaatgatctacgtgcgatatcaccccaagcaaaggctttacttcaagacaaggatgtcatagcgatcaaccaagatcctcttggtaaacaaggttatcaattgagaaaaggtgacaactttgaagtgtgggaaagaccattgtctggagacgcgtgggctgttgctattatcaaccgtcaagagatcggagggccaagatcttacactatcccggtagcctctttgggtaagggtgttgcgtgcaatcctgcctgcttcattacacaattgcttccagttaagagaaaattgggtgtctatgaagcaacctctaggctaagaagtcacattaatcctactggtacggtattgttgcaattggagaacacaatgcaaacctctttgaaagatttgttataa

SEQ ID NO: 70 - protein, 398 aa, Artificial Sequence
  variant of human alpha-galactosidase A
LDNGLALTPPMGWLHWERFMCNLDCQEEPDSCISEKLFEEMAERMVTEGWKDAGYEYLCIDDCWMAPQRDSEGRLQADPQRFPHGIRQLANHVHSKGLKLGIYADVGNKTCAGFPGSFGYYDIDAQTFADWGVDLLKFDGCYCDSLENLADGYKHMSLALNRTGRPIVYSCEWPLYMWPFQKPNYTEIRQYCNHWRNFADIDDSWASIKSILDWTSRNQERIVDVAGPGGWNDPDMLVIGNFGLSWDQQVTQMALWAIMAGPLFMSNDLRAISPQAKALLQDKDVIAINQDPLGKQGYQLRKGDNFEVWERPLSGDAWAVAIINRQEIGGPRSYTIPVASLGKGVACNPACFITQLLPVKRKLGVYEATSRLRSHINPTGTVLLQLENTMQTSLKDLL

SEQ ID NO: 71 - DNA, 1197 bp, Artificial Sequence
  variant of human alpha-galactosidase A
ttggataacgggttagccctgacacctccgatgggttggcttcactgggaaagattcatgtgtaacttagattgccaagaagagcctgacagctgtatctcagagaaactattcgaagagatggctgaacggatggtaaccgaaggatggaaggatgctggttatgaatacctatgtattgatgattgctggatggctccacagcgtgattcagaaggtaggttacaagctgacccccagagattcccacatggcatacgtgcccttgcaaaccatgtacacagcaaaggtctaaagttaggcatctacgctgatgtcggaaacaagacatgtgctggtttcccaggttcatttggtcactatgacatagatgcgcagacgtttgctgattggggtgttgatttgttgaagtttgatggatgctactgcgattccctggagaacctagccgatgggtacaaacacatgagtttggctctaaacaggactggtaggccgatcgtctatagttgtgaatggcccttgtacatgtggccgtttcagaagccaaactacactgagataagacaatactgtaaccattggcgtaactttgctgacatagatgattcatgggcttcaatcaaatctatcttggattggacttctcgtaaccaggaaagaattgttgatgttgcaggtccaggtggatggaatgaccctgatatgcttgtcatagggaactttgggctatcatgggaccaacaagttacacaaatggctttgtgggcgatcatggccggccccctattcatgtctaatgatctacgtgcgatatcaccccaagcaaaggctttacttcaagacaaggatgtcatagcgatcaaccaagatcctcttggtaaacaaggttatcaattgagaaaaggtgacgggtttgaagtgtgggaaagaccattgtctggagacgcgtgggctgttgctattatcaaccgtcaagagatcggagggccaagatcttacactatcccggtagcctctttgggtaagggtgttgcgtgcaatcctgcctgcttcattacacaattgcttccagttaagagaaaattgggtgtctatgaagcaacctctaggctaagaagtcacattaatcctactggtacggtattgttgcaattggagaacacaatgcaaacctctttgaaagatttgttataa

SEQ ID NO: 72 - protein, 398 aa, Artificial Sequence
  variant of human alpha-galactosidase A
LDNGLALTPPMGWLHWERFMCNLDCQEEPDSCISEKLFEEMAERMVTEGWKDAGYEYLCIDDCWMAPQRDSEGRLQADPQRFPHGIRALANHVHSKGLKLGIYADVGNKTCAGFPGSFGHYDIDAQTFADWGVDLLKFDGCYCDSLENLADGYKHMSLALNRTGRPIVYSCEWPLYMWPFQKPNYTEIRQYCNHWRNFADIDDSWASIKSILDWTSRNQERIVDVAGPGGWNDPDMLVIGNFGLSWDQQVTQMALWAIMAGPLFMSNDLRAISPQAKALLQDKDVIAINQDPLGKQGYQLRKGDGFEVWERPLSGDAWAVAIINRQEIGGPRSYTIPVASLGKGVACNPACFITQLLPVKRKLGVYEATSRLRSHINPTGTVLLQLENTMQTSLKDLL

SEQ ID NO: 73 - DNA, 1197 bp, Artificial Sequence
  variant of human alpha-galactosidase A
ttggataacgggttagccctgacacctccgatgggttggcttcactgggaaagattcatgtgtaacttagattgccaagaagagcctgacagctgtatctcagagaaactattcgaagagatggctgaacggatggtaaccgaaggatggaaggatgctggttatgaatacctatgtattgatgattgctggatggctccacagcgtgattcagaaggtaggttacaagctgacccccagagattcccacatggcatacgtcagcttgcaaaccatgtacacagcaaaggtctaaagttaggcatctacgctgatgtcggaaacaagacatgtgctggtttcccaggttcattcggttactatgacatagatgcgcagacgtttgctgattggggtgttgatttgttgaagtttgatggatgctactgcgattccctggagaacctagccgatgggtacaaacacatgagtttggctctaaacaggactggtaggccgatcgtctatagttgtgaatggcccttgtacatgtggccgtttcagaagccaaactacactgagataagacaatactgtaaccattggcgtaactttgctgacatagatgattcatgggcttcaatcaaatctatcttggattggacttctcgtaaccaggaaagaattgttgatgttgcaggtccaggtggatggaatgaccctgatatgcttgtcatagggaactttgggctatcatgggaccaacaagttacacaaatggctttgtgggcgatcatggccggccccctattcatgtctaatgatctacgtgcgatatcaccccaagcaaaggctttacttcaagataaggatgtcatagcgatcaaccaagatcctcttggtaaacaaggttatcaattgagaaaaggtgacgggtttgaagtgtgggaaagaccattgtctggagacgcgtgggctgttgctattatcaaccgtcaagagatcggagggccaagatcttacactatcccggtagcctctttgggtaagggtgttgcgtgcaatcctgcctgcttcattacacaattgcttccagttaagagaaaattgggtttctatgaagcaacctctaggctaagaagtcacattaatcctactggtacggtattgttgcaattggagaacacaatgcaaacctctttgaaagatttgttataa

SEQ ID NO: 74 - protein, 398 aa, Artificial Sequence
  variant of human alpha-galactosidase A
LDNGLALTPPMGWLHWERFMCNLDCQEEPDSCISEKLFEEMAERMVTEGWKDAGYEYLCIDDCWMAPQRDSEGRLQADPQRFPHGIRQLANHVHSKGLKLGIYADVGNKTCAGFPGSFGYYDIDAQTFADWGVDLLKFDGCYCDSLENLADGYKHMSLALNRTGRPIVYSCEWPLYMWPFQKPNYTEIRQYCNHWRNFADIDDSWASIKSILDWTSRNQERIVDVAGPGGWNDPDMLVIGNFGLSWDQQVTQMALWAIMAGPLFMSNDLRAISPQAKALLQDKDVIAINQDPLGKQGYQLRKGDGFEVWERPLSGDAWAVAIINRQEIGGPRSYTIPVASLGKGVACNPACFITQLLPVKRKLGFYEATSRLRSHINPTGTVLLQLENTMQTSLKDLL

SEQ ID NO: 75 - DNA, 1197 bp, Artificial Sequence
  variant of human alpha-galactosidase A
ttggataacgggttagcccgtacacctccgatgggttggcttcactgggaaagattcatgtgtaacttagattgccaagaagagcctgacagctgtatctcagagaaactattcgaagagatggctgaacggatggtaaccgaaggatggaaggatgctggttatgaatacctatgtattgatgattgctggatggctccacagcgtgattcagaaggtaggttacaagctgacccccagagattcccacatggcatacgtgcccttgcaaaccatgtacacagcaaaggtctaaagttaggcatctacgctgatgtcggaaacaagacatgtgctggtttcccaggttcatttggttactatgacatagatgcgcagacgtttgctgattggggtgttgatttgttgaagtttgatggatgctactgcgattccctggagaacctagccgatgggtacaaacacatgagtttggctctaaacaggactggtaggccgatcgtctatagttgtgaatggcccttgtacatgtggccgtttcagaagccaaactacactgagataagacaatactgtaaccattggcgtaactttgctgacatagatgattcatgggcttcaatcaaatctatcttggattggacttctcgtaaccaggaaagaattgttgatgttgcaggtccaggtggatggaatgaccctgatatgcttgtcatagggaactttgggctatcatgggaccaacaagttacacaaatggctttgtgggcgatcatggccggccccctattcatgtctaatgatctacgtgcgatatcaccccaagcaaaggctttacttcaagataaggatgtcatagcgatcaaccaagatcctcttggtaaacaaggttatcaattgagaaaaggtgacaactttgaagtgtgggaaagaccattgtctggagacgcgtgggctgttgctattatcaaccgtcaagagatcggagggccaagatcttacactatcccggtagcctctttgggtaagggtgttgcgtgcaatcctgcctgcttcattacacaattgcttccagttaagagaaaattgggtttctatgaagcaacctctaggctaagaagtcacattaatcctactggtacggtattgttgcaattggagaacacaatgcaaacctctttgaaagatttgttataa

SEQ ID NO: 76 - protein, 398 aa, Artificial Sequence
  variant of human alpha-galactosidase A
LDNGLARTPPMGWLHWERFMCNLDCQEEPDSCISEKLFEEMAERMVTEGWKDAGYEYLCIDDCWMAPQRDSEGRLQADPQRFPHGIRALANHVHSKGLKLGIYADVGNKTCAGFPGSFGYYDIDAQTFADWGVDLLKFDGCYCDSLENLADGYKHMSLALNRTGRPIVYSCEWPLYMWPFQKPNYTEIRQYCNHWRNFADIDDSWASIKSILDWTSRNQERIVDVAGPGGWNDPDMLVIGNFGLSWDQQVTQMALWAIMAGPLFMSNDLRAISPQAKALLQDKDVIAINQDPLGKQGYQLRKGDNFEVWERPLSGDAWAVAIINRQEIGGPRSYTIPVASLGKGVACNPACFITQLLPVKRKLGFYEATSRLRSHINPTGTVLLQLENTMQTSLKDLL

SEQ ID NO: 77 - DNA, 1197 bp, Artificial Sequence
  variant of human alpha-galactosidase A
ttggataacgggttagcccgtacacctccgatgggttggcttcactgggaaagattcatgtgtaacttagattgccaagaagagcctgacagctgtatctcagagaaactattcgaagagatggctgaacggatggtaaccgaaggatggaaggatgctggttatgaatacctatgtattgatgattgctggatggctccacagcgtgattcagaaggtaggttacaagctgacccccagagattcccacatggcatacgtcagcttgcaaaccatgtacacagcaaaggtctaaagttaggcatctacgctgatgtcggaaacaagacatgtgctggtttcccaggttcattcggttactatgacatagatgcgcagacgtttgctgattggggtgttgatttgttgaagtttgatggatgctactgcgattccctggagaacctagccgatgggtacaaacacatgagtttggctctaaacaggactggtaggccgatcgtctatagttgtgaatggcccttgtacatgtggccgtttcagaagccaaactacactgagataagacaatactgtaaccattggcgtaactttgctgacatagatgattcatgggcttcaatcaaatctatcttggattggacttctcgtaaccaggaaagaattgttgatgttgcaggtccaggtggatggaatgaccctgatatgcttgtcatagggaactttgggctatcatgggaccaacaagttacacaaatggctttgtgggcgatcatggccggccccctattcatgtctaatgatctacgtgcgatatcaccccaagcaaaggctttacttcaaaacaaggatgtcatagcgatcaaccaagatcctcttggtaaacaaggttatcaattgagaaaaggtgacaattttgaagtgtgggaaagaccattgtctggagacgcgtgggctgttgctattatcaaccgtcaagagatcggagggccaagatcttacactatcccggtagcctctttgggtaagggtgttgcgtgcaatcctgcctgcttcattacacaattgcttccagttaagagaaaattgggtttctatgaagcaacctctaggctaagaagtcacattaatcctactggtacggtattgttgcaattggagaacacaatgcaaacctctttgaaagatttgttataa

SEQ ID NO: 78 - protein, 398 aa, Artificial Sequence
  variant of human alpha-galactosidase A
LDNGLARTPPMGWLHWERFMCNLDCQEEPDSCISEKLFEEMAERMVTEGWKDAGYEYLCIDDCWMAPQRDSEGRLQADPQRFPHGIRQLANHVHSKGLKLGIYADVGNKTCAGFPGSFGYYDIDAQTFADWGVDLLKFDGCYCDSLENLADGYKHMSLALNRTGRPIVYSCEWPLYMWPFQKPNYTEIRQYCNHWRNFADIDDSWASIKSILDWTSRNQERIVDVAGPGGWNDPDMLVIGNFGLSWDQQVTQMALWAIMAGPLFMSNDLRAISPQAKALLQNKDVIAINQDPLGKQGYQLRKGDNFEVWERPLSGDAWAVAIINRQEIGGPRSYTIPVASLGKGVACNPACFITQLLPVKRKLGFYEATSRLRSHINPTGTVLLQLENTMQTSLKDLL

SEQ ID NO: 79 - DNA, 1197 bp, Artificial Sequence
  variant of human alpha-galactosidase A
ttggataacgggttagcccgtacacctccgatgggttggcttcactgggaaagattcatgtgtaacttagattgccaagaagagcctgacagctgtatctcagagaaactattcgaagagatggctgaacggatggtaaccgaaggatggaaggatgctggttatgaatacctatgtattgatgattgctggatggctccacagcgtgattcagaaggtaggttacaagctgacccccagagattcccacatggcatacgtcagcttgcaaaccatgtacacagcaaaggtctaaagttaggcatctacgctgatgtcggaaacaagacatgtgctggtttcccaggttcattcggttactatgacatagatgcgcagacgtttgctgattggggtgttgatttgttgaagtttgatggatgctactgcgattccctggagaacctagccgatgggtacaaacacatgagtttggctctaaacaggactggtaggccgatcgtctatagttgtgaatggcccttgtacatgtggccgtttcagaagccaaactacactgagataagacaatactgtaaccattggcgtaactttgctgacatagatgattcatgggcttcaatcaaatctatcttggattggacttctcgtaaccaggaaagaattgttgatgttgcaggtccaggtggatggaatgaccctgatatgcttgtcatagggaactttgggctatcatgggaccaacaagttacacaaatggctttgtgggcgatcatggccggccccctattcatgtctaatgatctacgtgcgatatcaccccaagcaaaggctttacttcaagataaggatgtcatagcgatcaaccaagatcctcttggtaaacaaggttatcgtatcagaaaaggtgacaattttgaagtgtgggaaagaccattgtctggagacgcgtgggctgttgctattatcaaccgtcaagagatcggagggccaagatcttacactatcccggtagcctctttgggtaagggtgttgcgtgcaatcctgcctgcttcattacacaattgcttccagttaagagaaaattgggtttctatgaagcaacctctaggctaagaagtcacattaatcctactggtacggtattgttgcaattggagaacacaatgcaaacctctttgaaagatttgttataa

SEQ ID NO: 80 - protein, 398 aa, Artificial Sequence
  variant of human alpha-galactosidase A
LDNGLARTPPMGWLHWERFMCNLDCQEEPDSCISEKLFEEMAERMVTEGWKDAGYEYLCIDDCWMAPQRDSEGRLQADPQRFPHGIRQLANHVHSKGLKLGIYADVGNKTCAGFPGSFGYYDIDAQTFADWGVDLLKFDGCYCDSLENLADGYKHMSLALNRTGRPIVYSCEWPLYMWPFQKPNYTEIRQYCNHWRNFADIDDSWASIKSILDWTSRNQERIVDVAGPGGWNDPDMLVIGNFGLSWDQQVTQMALWAIMAGPLFMSNDLRAISPQAKALLQDKDVIAINQDPLGKQGYRIRKGDNFEVWERPLSGDAWAVAIINRQEIGGPRSYTIPVASLGKGVACNPACFITQLLPVKRKLGFYEATSRLRSHINPTGTVLLQLENTMQTSLKDLL

SEQ ID NO: 81 - DNA, 1197 bp, Artificial Sequence
  variant of human alpha-galactosidase A
ttggataacgggttagcccgtacacctccgatgggttggcttcactgggaaagattcatgtgtaacttagattgccaagaagagcctgacagctgtatctcagagaaactattcgaagagatggctgaacggatggtaaccgaaggatggaaggatgctggttatgaatacctatgtattgatgattgctggatggctccacagcgtgattcagaaggtaggttacaagctgacccccagagattcccacatggcatacgtcagcttgcaaaccatgtacacagcaaaggtctaaagttaggcatctacgctgatgtcggaaacaagacatgtgctggtttcccaggttcatttggtcactatgacatagatgcgcagacgtttgctgattggggtgttgatttgttgaagtttgatggatgctactgcgattccctggagaacctagccgatgggtacaaacacatgagtttggctctaaacaggactggtaggccgatcgtctatagttgtgaatggcccttgtacatgtggccgtttcagaagccaaactacactgagataagacaatactgtaaccattggcgtaactttgctgacatagatgattcatgggcttcaatcaaatctatcttggattggacttctcgtaaccaggaaagaattgttgatgttgcaggtccaggtggatggaatgaccctgatatgcttgtcatagggaactttgggctatcatgggaccaacaagttacacaaatggctttgtgggcgatcatggccggccccctattcatgtctaatgatctacgtgcgatatcaccccaagcaaaggctttacttcaagacaaggatgtcatagcgatcaaccaagatcctcttggtaaacaaggttatcaattgagaaaaggtgacaactttgaagtgtgggaaagaccattgtctggagacgcgtgggctgttgctattatcaaccgtcaagagatcggagggccaagatcttacactatcccggtagcctctttgggtaagggtgttgcgtgcaatcctgcctgcttcattacacaattgcttccagttaagagaaaattgggtttctatgaagcaacctctaggctaagaagtcacattaatcctactggtacggtattgttgcaattggagaacacaatgcaaacctctttgaaagatttgttataa

SEQ ID NO: 82 - protein, 398 aa, Artificial Sequence
  variant of human alpha-galactosidase A
LDNGLARTPPMGWLHWERFMCNLDCQEEPDSCISEKLFEEMAERMVTEGWKDAGYEYLCIDDCWMAPQRDSEGRLQADPQRFPHGIRQLANHVHSKGLKLGIYADVGNKTCAGFPGSFGHYDIDAQTFADWGVDLLKFDGCYCDSLENLADGYKHMSLALNRTGRPIVYSCEWPLYMWPFQKPNYTEIRQYCNHWRNFADIDDSWASIKSILDWTSRNQERIVDVAGPGGWNDPDMLVIGNFGLSWDQQVTQMALWAIMAGPLFMSNDLRAISPQAKALLQDKDVIAINQDPLGKQGYQLRKGDNFEVWERPLSGDAWAVAIINRQEIGGPRSYTIPVASLGKGVACNPACFITQLLPVKRKLGFYEATSRLRSHINPTGTVLLQLENTMQTSLKDLL

SEQ ID NO: 83 - DNA, 1197 bp, Artificial Sequence
  variant of human alpha-galactosidase A
ttggataacgggttagccctgacacctccgatgggttggcttcactgggaaagattcatgtgtaacttagattgccaagaagagcctgacagctgtatctcagagaaactattcgaagagatggctgaacggatggtaaccgaaggatggaaggatgctggttatgaatacctatgtattgatgattgctggatggctccacagcgtgattcagaaggtaggttacaagctgacccccagagattcccacatggcatacgtcagcttgcaaaccatgtacacagcaaaggtctaaagttaggcatctacgctgatgtcggaaacaagacatgtgctggtttcccaggttcattcggttactatgacatagatgcgcagacgtttgctgattggggtgttgatttgttgaagtttgatggatgctactgcgattccctggagaacctagccgatgggtacaaacacatgagtttggctctaaacaggactggtaggccgatcgtctatagttgtgaatggcccttgtacatgtggccgtttcagaagccaaactacactgagataagacaatactgtaaccattggcgtaactttgctgacatagatgattcatgggcttcaatcaaatctatcttggattggacttctcgtaaccaggaaagaattgttgatgttgcaggtccaggtggatggaatgaccctgatatgcttgtcatagggaactttgggctatcatgggaccaacaagttacacaaatggctttgtgggcgatcatggccggccccctattcatgtctaatgatctacgtgcgatatcaccccaagcaaaggctttacttcaagacaaggatgtcatagcgatcaaccaagatcctcttggtaaacaaggttatcaattgagaaaaggtgacaactttgaagtgtgggaaagaccattgtctggagacgcgtgggctgttgctattatcaaccgtcaagagatcggagggccaagatcttacactatcccggtagcctctttgggtaagggtgttgcgtgcaatcctgcctgcttcattacacaattgcttccagttaagagaaaattgggtttctatgaagcaacctctaggctaagaagtcacattaatcctactggtacggtattgttgcaattggagaacacaatgcaaacctctttgaaagatttgttataa

SEQ ID NO: 84 - protein, 398 aa, Artificial Sequence
  variant of human alpha-galactosidase A
LDNGLALTPPMGWLHWERFMCNLDCQEEPDSCISEKLFEEMAERMVTEGWKDAGYEYLCIDDCWMAPQRDSEGRLQADPQRFPHGIRQLANHVHSKGLKLGIYADVGNKTCAGFPGSFGYYDIDAQTFADWGVDLLKFDGCYCDSLENLADGYKHMSLALNRTGRPIVYSCEWPLYMWPFQKPNYTEIRQYCNHWRNFADIDDSWASIKSILDWTSRNQERIVDVAGPGGWNDPDMLVIGNFGLSWDQQVTQMALWAIMAGPLFMSNDLRAISPQAKALLQDKDVIAINQDPLGKQGYQLRKGDNFEVWERPLSGDAWAVAIINRQEIGGPRSYTIPVASLGKGVACNPACFITQLLPVKRKLGFYEATSRLRSHINPTGTVLLQLENTMQTSLKDLL

SEQ ID NO: 85 - DNA, 1197 bp, Artificial Sequence
  variant of human alpha-galactosidase A
ttggataacgggttagccctgacacctccgatgggttggcttcactgggaaagattcatgtgtaacttagattgccaagaagagcctgacagctgtatctcagagaaactattcgaagagatggctgaacggatggtaaccgaaggatggaaggatgctggttatgaatacctatgtattgatgattgctggatggctccacagcgtgattcagaaggtaggttacaagctgacccccagagattcccacatggcatacgtcagcttgcaaaccatgtacacagcaaaggtctaaagttaggcatctacgctgatgtcggaaacaagacatgtgctggtttcccaggttcattcggttactatgacatagatgcgcagacgtttgctgattggggtgttgatttgttgaagtttgatggatgctactgcgattccctggagaacctagccgatgggtacaaacacatgagtttggctctaaacaggactggtaggccgatcgtctatagttgtgaatggcccttgtacatgtggccgtttcagaagccaaactacactgagataagacaatactgtaaccattggcgtaactttgctgacatagatgattcatgggcttcaatcaaatctatcttggattggacttctcgtaaccaggaaagaattgttgatgttgcaggtccaggtggatggaatgaccctgatatgcttgtcatagggaactttgggctatcatgggaccaacaagttacacaaatggctttgtgggcgatcatggccggccccctattcatgtctaatgatctacgtgcgatatcaccccaagcaaaggctttacttcaagataaggatgtcatagcgatcaaccaagatcctcttggtaaacaaggttatcaattgagaaaaggtgacgggtttgaagtgtgggaaagaccattgtctggagacgcgtgggctgttgctattatcaaccgtcaagagatcggagggccaagatcttacactatcccggtagcctctttgggtaagggtgttgcgtgcaatcctgcctgcttcattacacaattgcttccagttaagagaaaattgggtgtctatgaagcaacctctaggctaagaagtcacattaatcctactggtacggtattgttgcaattggagaacacaatgcaaacctctttgaaagatttgttataa

SEQ ID NO: 86 - protein, 398 aa, Artificial Sequence
  variant of human alpha-galactosidase A
LDNGLALTPPMGWLHWERFMCNLDCQEEPDSCISEKLFEEMAERMVTEGWKDAGYEYLCIDDCWMAPQRDSEGRLQADPQRFPHGIRQLANHVHSKGLKLGIYADVGNKTCAGFPGSFGYYDIDAQTFADWGVDLLKFDGCYCDSLENLADGYKHMSLALNRTGRPIVYSCEWPLYMWPFQKPNYTEIRQYCNHWRNFADIDDSWASIKSILDWTSRNQERIVDVAGPGGWNDPDMLVIGNFGLSWDQQVTQMALWAIMAGPLFMSNDLRAISPQAKALLQDKDVIAINQDPLGKQGYQLRKGDGFEVWERPLSGDAWAVAIINRQEIGGPRSYTIPVASLGKGVACNPACFITQLLPVKRKLGVYEATSRLRSHINPTGTVLLQLENTMQTSLKDLL

SEQ ID NO: 87 - DNA, 1197 bp, Artificial Sequence
  variant of human alpha-galactosidase A
ttggataacgggttagcccgtacacctccgatgggttggcttcactgggaaagattcatgtgtaacttagattgccaagaagagcctgacagctgtatctcagagaaactattcgaagagatggctgaacggatggtaaccgaaggatggaaggatgctggttatgaatacctatgtattgatgattgctggatggctccacagcgtgattcagaaggtaggttacaagctgacccccagagattcccacatggcatacgtcagcttgcaaaccatgtacacagcaaaggtctaaagttaggcatctacgctgatgtcggaaacaagacatgtgctggtttcccaggttcatttggtcactatgacatagatgcgcagacgtttgctgattggggtgttgatttgttgaagtttgatggatgctactgcgattccctggagaacctagccgatgggtacaaacacatgagtttggctctaaacaggactggtaggccgatcgtctatagttgtgaatggcccttgtacatgtggccgtttcagaagccaaactacactgagataagacaatactgtaaccattggcgtaactttgctgacatagatgattcatgggcttcaatcaaatctatcttggattggacttctcgtaaccaggaaagaattgttgatgttgcaggtccaggtggatggaatgaccctgatatgcttgtcatagggaactttgggctatcatgggaccaacaagttacacaaatggctttgtgggcgatcatggccggccccctattcatgtctaatgatctacgtgcgatatcaccccaagcaaaggctttacttcaagataaggatgtcatagcgatcaaccaagatcctcttggtaaacaaggttatcgtctgagaaaaggtgacgggtttgaagtgtgggaaagaccattgtctggagacgcgtgggctgttgctattatcaaccgtcaagagatcggagggccaagatcttacactatcccggtagcctctttgggtaagggtgttgcgtgcaatcctgcctgcttcattacacaattgcttccagttaagagaaaattgggtttctatgaagcaacctctaggctaagaagtcacattaatcctactggtacggtattgttgcaattggagaacacaatgcaaacctctttgaaagatttgttataa

SEQ ID NO: 88 - protein, 398 aa, Artificial Sequence
  variant of human alpha-galactosidase A
LDNGLARTPPMGWLHWERFMCNLDCQEEPDSCISEKLFEEMAERMVTEGWKDAGYEYLCIDDCWMAPQRDSEGRLQADPQRFPHGIRQLANHVHSKGLKLGIYADVGNKTCAGFPGSFGHYDIDAQTFADWGVDLLKFDGCYCDSLENLADGYKHMSLALNRTGRPIVYSCEWPLYMWPFQKPNYTEIRQYCNHWRNFADIDDSWASIKSILDWTSRNQERIVDVAGPGGWNDPDMLVIGNFGLSWDQQVTQMALWAIMAGPLFMSNDLRAISPQAKALLQDKDVIAINQDPLGKQGYRLRKGDGFEVWERPLSGDAWAVAIINRQEIGGPRSYTIPVASLGKGVACNPACFITQLLPVKRKLGFYEATSRLRSHINPTGTVLLQLENTMQTSLKDLL

SEQ ID NO: 89 - DNA, 1197 bp, Artificial Sequence
  variant of human alpha-galactosidase A
ttggataacgggttagccctgacacctccgatgggttggcttcactgggaaagattcatgtgtaacttagattgccaagaagagcctgacagctgtatctcagagaaactattcgaagagatggctgaacggatggtaaccgatggatggaaggatgctggttatgaatacctatgtattgatgattgctggatggctccagagcgtgattcagaaggtaggttacaagctgacccccagagattcccacatggcatacgtcagcttgcaaaccatgtacacagcaaaggtctaaagttaggcatctacgctgatgtcggaaacaagacatgtgctggtttcccaggttcatttggtcactatgacatagatgcgcagacgtttgctgattggggtgttgatttgttgaagtttgatggatgctactgcgattcgctggagaacctagccgatgggtacaaacacatgagtttggctctaaacaggactggtaggccgatcgtctatagttgtgaatggcccttgtacatgtggccgtttcagaagccaaactacactgagataagacaatactgtaaccattggcgtaactttgctgacatagatgattcatgggcttcaatcaaatctatcttggattggacttctcgtaaccaggaaagaattgttgatgttgcaggtccaggtggatggaatgaccctgatatgcttgtcatagggaactttgggctatcatgggaccaacaagttacacaaatggctttgtgggcgatcatggccggccccctattcatgtctaatgatctacgtgcgatatcaccccaagcaaaggctttacttcaaaacaaggatgtcatagcgatcaaccaagatcctcttggtaaacaaggttatcgtctgagaaaaggtgacaattttgaagtgtgggaaagaccattgtctggagacgcgtgggctgttgctattatcaaccgtcaagagatcggagggccaagatcttacactatcccggtagcctctttgggtaagggtgttgcgtgcaatcctgcctgcttcattacacaattgcttccagttaagagaaaattgggtttctatgaagcaacctctaggctaagaagtcacattaatcctactggtacggtattgttgcaattggagaacacaatgcaaacctctttgaaagatttgttataa

SEQ ID NO: 90 - protein, 398 aa, Artificial Sequence
  variant of human alpha-galactosidase A
LDNGLALTPPMGWLHWERFMCNLDCQEEPDSCISEKLFEEMAERMVTDGWKDAGYEYLCIDDCWMAPERDSEGRLQADPQRFPHGIRQLANHVHSKGLKLGIYADVGNKTCAGFPGSFGHYDIDAQTFADWGVDLLKFDGCYCDSLENLADGYKHMSLALNRTGRPIVYSCEWPLYMWPFQKPNYTEIRQYCNHWRNFADIDDSWASIKSILDWTSRNQERIVDVAGPGGWNDPDMLVIGNFGLSWDQQVTQMALWAIMAGPLFMSNDLRAISPQAKALLQNKDVIAINQDPLGKQGYRLRKGDNFEVWERPLSGDAWAVAIINRQEIGGPRSYTIPVASLGKGVACNPACFITQLLPVKRKLGFYEATSRLRSHINPTGTVLLQLENTMQTSLKDLL

SEQ ID NO: 91 - DNA, 1197 bp, Artificial Sequence
  variant of human alpha-galactosidase A
ttggataacgggttagcccgtacacctccgatgggttggcttcactgggaaagattcatgtgtaacttagattgccaagaagagcctgacagctgtatctcagagaaactattcgaagagatggctgaacggatggtaaccgatggatggaaggatgctggttatgaatacctatgtattgatgattgctggatggctccacagcgtgattcagaaggtaggttacaagctgacccccagagattcccacatggcatacgtcagcttgcaaaccatgtacacagcaaaggtctaaagttaggcatctacgctgatgtcggaaacaagacatgtgctggtttcccaggttcattcggttactatgacatagatgcgcagacgtttgctgattggggtgttgatttgttgaagtttgatggatgctactgcgattccctggagaacctagccgatgggtacaaacacatgagtttggctctaaacaggactggtaggccgatcgtctatagttgtgaatggcccttgtacatgtggccgtttcagaagccaaactacactgagataagacaatactgtaaccattggcgtaactttgctgacatagatgattcatgggcttcaatcaaatctatcttggattggacttctcgtaaccaggaaagaattgttgatgttgcaggtccaggtggatggaatgaccctgatatgcttgtcatagggaactttgggctatcatgggaccaacaagttacacaaatggctttgtgggcgatcatggccggccccctattcatgtctaatgatctacgtgcgatatcaccccaagcaaaggctttacttcaagataaggatgtcatagcgatcaaccaagatcctcttggtaaacaaggttatcaattgagaaaaggtgacaactttgaagtgtgggaaagaccattgtctggagacgcgtgggctgttgctattatcaaccgtcaagagatcggagggccaagatcttacactatcccggtagcctctttgggtaagggtgttgcgtgcaatcctgcctgcttcattacacaattgcttccagttaagagaaaattgggtttctatgaagcaacctctaggctaagaagtcacattaatcctactggtacggtattgttgcaattggagaacacaatgcaaacctctttgaaagatttgttataa

SEQ ID NO: 92 - protein, 398 aa, Artificial Sequence
  variant of human alpha-galactosidase A
LDNGLARTPPMGWLHWERFMCNLDCQEEPDSCISEKLFEEMAERMVTDGWKDAGYEYLCIDDCWMAPQRDSEGRLQADPQRFPHGIRQLANHVHSKGLKLGIYADVGNKTCAGFPGSFGYYDIDAQTFADWGVDLLKFDGCYCDSLENLADGYKHMSLALNRTGRPIVYSCEWPLYMWPFQKPNYTEIRQYCNHWRNFADIDDSWASIKSILDWTSRNQERIVDVAGPGGWNDPDMLVIGNFGLSWDQQVTQMALWAIMAGPLFMSNDLRAISPQAKALLQDKDVIAINQDPLGKQGYQLRKGDNFEVWERPLSGDAWAVAIINRQEIGGPRSYTIPVASLGKGVACNPACFITQLLPVKRKLGFYEATSRLRSHINPTGTVLLQLENTMQTSLKDLL

SEQ ID NO: 93 - DNA, 1197 bp, Artificial Sequence
  variant of human alpha-galactosidase A
ttggataacgggttagcccgtacacctccgatgggttggcttcactgggaaagattcatgtgtaacttagattgccaagaagagcctgacagctgtatctcagagaaactattcgaagagatggctgaacggatggtaaccgaaggatggaaggatgctggttatgaatacctatgtattgatgattgctggatggctccagagcgtgattcagaaggtaggttacaagctgacccccagagattcccacatggcatacgtcagcttgcaaaccatgtacacagcaaaggtctaaagttaggcatctacgctgatgtcggaaacaagacatgtgctggtttcccaggttcattcggttactatgacatagatgcgcagacgtttgctgattggggtgttgatttgttgaagtttgatggatgctactgcgattccctggagaacctagccgatgggtacaaacacatgagtttggctctaaacaggactggtaggccgatcgtctatagttgtgaatggcccttgtacatgtggccgtttcagaagccaaactacactgagataagacaatactgtaaccattggcgtaactttgctgacatagatgattcatgggcttcaatcaaatctatcttggattggacttctcgtaaccaggaaagaattgttgatgttgcaggtccaggtggatggaatgaccctgatatgcttgtcatagggaactttgggctatcatgggaccaacaagttacacaaatggctttgtgggcgatcatggccggccccctattcatgtctaatgatctacgtgcgatatcaccccaagcaaaggctttacttcaagataaggatgtcatagcgatcaaccaagatcctcttggtaaacaaggttatcaattgagaaaaggtgacaactttgaagtgtgggaaagaccattgtctggagacgcgtgggctgttgctattatcaaccgtcaagagatcggagggccaagatcttacactatcccggtagcctctttgggtaagggtgttgcgtgcaatcctgcctgcttcattacacaattgcttccagttaagagaaaattgggtttctatgaagcaacctctaggctaagaagtcacattaatcctactggtacggtattgttgcaattggagaacacaatgcaaacctctttgaaagatttgttataa

SEQ ID NO: 94 - protein, 398 aa, Artificial Sequence
  variant of human alpha-galactosidase A
LDNGLARTPPMGWLHWERFMCNLDCQEEPDSCISEKLFEEMAERMVTEGWKDAGYEYLCIDDCWMAPERDSEGRLQADPQRFPHGIRQLANHVHSKGLKLGIYADVGNKTCAGFPGSFGYYDIDAQTFADWGVDLLKFDGCYCDSLENLADGYKHMSLALNRTGRPIVYSCEWPLYMWPFQKPNYTEIRQYCNHWRNFADIDDSWASIKSILDWTSRNQERIVDVAGPGGWNDPDMLVIGNFGLSWDQQVTQMALWAIMAGPLFMSNDLRAISPQAKALLQDKDVIAINQDPLGKQGYQLRKGDNFEVWERPLSGDAWAVAIINRQEIGGPRSYTIPVASLGKGVACNPACFITQLLPVKRKLGFYEATSRLRSHINPTGTVLLQLENTMQTSLKDLL

SEQ ID NO: 95 - DNA, 1197 bp, Artificial Sequence
  variant of human alpha-galactosidase A
ttggataacgggttagccctgacacctccgatgggttggcttcactgggaaagattcatgtgtaacttagattgccaagaagagcctgacagctgtatctcagagaaactattcgaagagatggctgaacggatggtaaccgaaggatggaaggatgctggttatgaatacctatgtattgatgattgctggatggctccacagcgtgattcagaaggtaggttacaagctgacccccagagattcccacatggcatacgtcagcttgcaaaccatgtacacagcaaaggtctaaagttaggcatctacgctgatgtcggaaacaagacatgtgctggtttcccaggttcattcggttactatgacatagatgcgcagacgtttgctgagtggggtgttgatttgttgaagtttgatggatgctactgcgattccctggagaacctagccgatgggtacaaacacatgagtttggctctaaacaggactggtaggccgatcgtctatagttgtgaatggcccttgtacatgtggccgtttcagaagccaaactacactgagataagacaatactgtaaccattggcgtaactttgctgacatagatgattcatgggcttcaatcaaatctatcttggattggacttctcgtaaccaggaaagaattgttgatgttgcaggtccaggtggatggaatgaccctgatatgcttgtcatagggaactttgggctatcatgggaccaacaagttacacaaatggctttgtgggcgatcatggccggccccctattcatgtctaatgatctacgtgcgatatcaccccaagcaaaggctttacttcaagataaggatgtcatagcgatcaaccaagatcctcttggtaaacaaggttatcaattgagaaaaggtgacaactttgaagtgtgggaaagaccattgtctggagacgcgtgggctgttgctattatcaaccgtcaagagatcggagggccaagatcttacactatcccggtagcctctttgggtaagggtgttgcgtgcaatcctgcctgcttcattacacaattgcttccagttaagagaaaattgggtttctatgaagcaacctctaggctaagaagtcacattaatcctactggtacggtattgttgcaattggagaacacaatgcaaacctctttgaaagatttgttataa

SEQ ID NO: 96 - protein, 398 aa, Artificial Sequence
  variant of human alpha-galactosidase A
LDNGLALTPPMGWLHWERFMCNLDCQEEPDSCISEKLFEEMAERMVTEGWKDAGYEYLCIDDCWMAPQRDSEGRLQADPQRFPHGIRQLANHVHSKGLKLGIYADVGNKTCAGFPGSFGYYDIDAQTFAEWGVDLLKFDGCYCDSLENLADGYKHMSLALNRTGRPIVYSCEWPLYMWPFQKPNYTEIRQYCNHWRNFADIDDSWASIKSILDWTSRNQERIVDVAGPGGWNDPDMLVIGNFGLSWDQQVTQMALWAIMAGPLFMSNDLRAISPQAKALLQDKDVIAINQDPLGKQGYQLRKGDNFEVWERPLSGDAWAVAIINRQEIGGPRSYTIPVASLGKGVACNPACFITQLLPVKRKLGFYEATSRLRSHINPTGTVLLQLENTMQTSLKDLL

SEQ ID NO: 97 - DNA, 1197 bp, Artificial Sequence
  variant of human alpha-galactosidase A
ttggataacgggttagcccgtacacctccgatgggttggcttcactgggaaagattcatgtgtaacttagattgccaagaagagcctgacagctgtatctcagagaaactattcgaagagatggctgaacggatggtaaccgaaggatggaaggatgctggttatgaatacctatgtattgatgattgctggatggctacacagcgtgattcagaaggtaggttacaagctgacccccagagattcccacatggcatacgtcagcttgcaaaccatgtacacagcaaaggtctaaagttaggcatctacgctgatgtcggaaacaagacatgtgctggtttcccaggttcattcggttactatgacatagatgcgcagacgtttgctgattggggtgttgatttgttgaagtttgatggatgctactgcgattcgctggagaacctagccgatgggtacaaacacatgagtttggctctaaacaggactggtaggccgatcgtctatagttgtgaatggcccttgtacatgtggccgggtcagaagccaaactacactgagataagacaatactgtaaccattggcgtaactttgctgacatagatgattcatgggcttcaatcaaatctatcttggattggacttctcgtaaccaggaaagaattgttgatgttgcaggtccaggtggatggaatgaccctgatatgcttgtcatagggaactttgggctatcatgggaccaacaagttacacaaatggctttgtgggcgatcatggccggccccctattcatgtctaatgatctacgtgcgatatcaccccaagcaaaggctttacttcaagataaggatgtcatagcgatcaaccaagatcctcttggtaaacaaggttatcaattgagaaaaggtgacaactttgaagtgtgggaaagaccattgtctggagacgcgtgggctgttgctattatcaaccgtcaagagatcggagggccaagatcttacactatcccggtagcctctttgggtaagggtgttgcgtgcaatcctgcctgcttcattacacaattgcttccagttaagagaaaattgggtttctatgaagcaacctctaggctaagaagtcacattaatcctactggtacggtattgttgcaattggagaacacaatgcaaacctctttgaaagatttgttataa

SEQ ID NO: 98 - protein, 398 aa, Artificial Sequence
  variant of human alpha-galactosidase A
LDNGLARTPPMGWLHWERFMCNLDCQEEPDSCISEKLFEEMAERMVTEGWKDAGYEYLCIDDCWMATQRDSEGRLQADPQRFPHGIRQLANHVHSKGLKLGIYADVGNKTCAGFPGSFGYYDIDAQTFADWGVDLLKFDGCYCDSLENLADGYKHMSLALNRTGRPIVYSCEWPLYMWPGQKPNYTEIRQYCNHWRNFADIDDSWASIKSILDWTSRNQERIVDVAGPGGWNDPDMLVIGNFGLSWDQQVTQMALWAIMAGPLFMSNDLRAISPQAKALLQDKDVIAINQDPLGKQGYQLRKGDNFEVWERPLSGDAWAVAIINRQEIGGPRSYTIPVASLGKGVACNPACFITQLLPVKRKLGFYEATSRLRSHINPTGTVLLQLENTMQTSLKDLL

SEQ ID NO: 99 - DNA, 1197 bp, Artificial Sequence
  variant of human alpha-galactosidase A
ttggataacgggttagccctgacacctccgatgggttggcttcactgggaaagattcatgtgtaacttagattgccaagaagagcctgacagctgtatctcagagaaactattcgaagagatggctgaacggatggtaaccgatggatggaaggatgctggttatgaatacctatgtattgatgattgctggatggctccacagcgtgattcagaaggtaggttacaagctgacccccagagattcccacatggcatacgtcagcttgcaaaccatgtacacagcaaaggtctaaagttaggcatctacgctgatgtcggaaacaagacatgtgctggtttcccaggttcattcggttactatgacatagatgcgcagacgtttgctgattggggtgttgatttgttgaagtttgatggatgctactgcgattcgctggagaacctagccgatgggtacaaacacatgagtttggctctaaacaggactggtaggccgatcgtctatagttgtgaatggcccttgtacatgtggccgggtcagaagccaaactacactgagataagacaatactgtaaccattggcgtaactttgctgacatagatgattcatgggcttcaatcaaatctatcttggattggacttctcgtaaccaggaaagaattgttgatgttgcaggtccaggtggatggaatgaccctgatatgcttgtcatagggaactttgggctatcatgggaccaacaagttacacaaatggctttgtgggcgatcatggccggccccctattcatgtctaatgatctacgtgcgatatcaccccaagcaaaggctttacttcaagataaggatgtcatagcgatcaaccaagatcctcttggtaaacaaggttatcaattgagaaaaggtgacaactttgaagtgtgggaaagaccattgtctggagacgcgtgggctgttgctattatcaaccgtcaagagatcggagggccaagatcttacactatcccggtagcctctttgggtaagggtgttgcgtgcaatcctgcctgcttcattacacaattgcttccagttaagagaaaattgggtttctatgaagcaacctctaggctaagaagtcacattaatcctactggtacggtattgttgcaattggagaacacaatgcaaacctctttgaaagatttgttataa

SEQ ID NO: 100 - protein, 398 aa, Artificial Sequence
  variant of human alpha-galactosidase A
LDNGLALTPPMGWLHWERFMCNLDCQEEPDSCISEKLFEEMAERMVTDGWKDAGYEYLCIDDCWMAPQRDSEGRLQADPQRFPHGIRQLANHVHSKGLKLGIYADVGNKTCAGFPGSFGYYDIDAQTFADWGVDLLKFDGCYCDSLENLADGYKHMSLALNRTGRPIVYSCEWPLYMWPGQKPNYTEIRQYCNHWRNFADIDDSWASIKSILDWTSRNQERIVDVAGPGGWNDPDMLVIGNFGLSWDQQVTQMALWAIMAGPLFMSNDLRAISPQAKALLQDKDVIAINQDPLGKQGYQLRKGDNFEVWERPLSGDAWAVAIINRQEIGGPRSYTIPVASLGKGVACNPACFITQLLPVKRKLGFYEATSRLRSHINPTGTVLLQLENTMQTSLKDLL

SEQ ID NO: 101 - DNA, 1197 bp, Artificial Sequence
  variant of human alpha-galactosidase A
ttggataacgggttagcccgtacacctccgatgggttggcttcactgggaaagattcatgtgtaacttagattgccaagaagagcctgacagctgtatctcagagaaactattcgaagagatggctgaacggatggtaaccgaaggatggaaggatgctggttatgaatacctatgtattgatgattgctggatggctccacagcgtgattcagaaggtaggttacaagctgacccccagagattcccacatggcatacgtcagcttgcaaaccatgtacacagcaaaggtctaaagttaggcatctacgctgatgtcggaaacaagacatgtgctggtttcccaggttcattcggttactatgacatagatgcgcagacgtttgctgattggggtgttgatttgttgaagtttgatggatgctactgcgattccctggagaacctagccgatgggtacaaacacatgagtttggctctaaacaggactggtaggccgatcgtctatagttgtgaatggcccttgtacatgtggccgtttcagaagccaaactacactgagataagacaatactgtaaccattggcgtaactttgctgacatagatgattcatgggcttcaatcaaatctatcttggattggacttctcgtaaccaggaaagaattgttgatgttgcaggtccaggtggatggaatgaccctgatatgcttgtcatagggaactttgggctatcatgggaccaacaagttacacaaatggctttgtgggcgatcatggccggccccctattcatgtctaatgatctacgtgcgatatcaccccaagcaaaggctttacttcaagacaaggatgtcatagcgatcaaccaagatcctcttggtaaacaaggttatcaattgagaaaaggtgacaactttgaagtgtgggaaagaccattgtctggagacgcgtgggctgttgctattatcaaccgtcaagagatcggagggccaagatcttacactatcccggtagcctctttgggtaagggtgttgcgtgcaatcctgcctgcttcattacacaattgcttccagttaagagaaaattgggtgtctatgaagcaacctctaggctaagaagtcacattaatcctactggtacggtattgttgcaattggagaacacaatgcaaacctctttgaaagatttgttataa

SEQ ID NO: 102 - protein, 398 aa, Artificial Sequence
  variant of human alpha-galactosidase A
LDNGLARTPPMGWLHWERFMCNLDCQEEPDSCISEKLFEEMAERMVTEGWKDAGYEYLCIDDCWMAPQRDSEGRLQADPQRFPHGIRQLANHVHSKGLKLGIYADVGNKTCAGFPGSFGYYDIDAQTFADWGVDLLKFDGCYCDSLENLADGYKHMSLALNRTGRPIVYSCEWPLYMWPFQKPNYTEIRQYCNHWRNFADIDDSWASIKSILDWTSRNQERIVDVAGPGGWNDPDMLVIGNFGLSWDQQVTQMALWAIMAGPLFMSNDLRAISPQAKALLQDKDVIAINQDPLGKQGYQLRKGDNFEVWERPLSGDAWAVAIINRQEIGGPRSYTIPVASLGKGVACNPACFITQLLPVKRKLGVYEATSRLRSHINPTGTVLLQLENTMQTSLKDLL

SEQ ID NO: 103 - DNA, 1197 bp, Artificial Sequence
  variant of human alpha-galactosidase A
ttggataacgggttagcccgtacacctccgatgggttggcttcactgggaaagattcatgtgtaacttagattgccaagaagagcctgacagctgtatctcagagaaactattcgaagagatggctgaacggatggtaaccgaaggatggaaggatgctggttatgaatacctatgtattgatgattgctggatggctccacagcgtgattcagaaggtaggttacaagctgacccccagagattcccacatggcatacgtcagcttgcaaaccatgtacacagcaaaggtctaaagttaggcatctacgctgatgtcggaaacaagacatgtgctggtttcccaggttcattcggttactatgacatagatgcgcagacgtttgctgattggggtgttgatttgttgaagtttgatggatgctactgcgattcgctggagaacctagccgatgggtacaaacacatgagtttggctctaaacaggactggtaggccgatcgtctatagttgtgaatggcccttgtacatgtggccgtttcagaagccaaactacactgagataagacaatactgtaaccattggcgtaactttgctgacatagatgattcatgggcttcaatcaaatctatcttggattggacttctcgtaaccaggaaagaattgttgatgttgcaggtccaggtggatggaatgaccctgatatgcttgtcatagggaactttgggctatcatgggaccaacaagttacacaaatggctttgtgggcgatcatggccggccccctattcatgtctaatgatctacgtgcgatatcaccccaagcaaaggctttacttcaagacaaggatgtcatagcgatcaaccaagatcctcttggtaaacaaggttatcaaatcagaaaaggtgacaattttgaagtgtgggaaagaccattgtctggagacgcgtgggctgttgctattatcaaccgtcaagagatcggagggccaagatcttacactatcccggtagcctctttgggtaagggtgttgcgtgcaatcctgcctgcttcattacacaattgcttccagttaagagaaaattgggtttctatgaagcaacctctaggctaagaagtcacattaatcctactggtacggtattgttgcaattggagaacacaatgcaaacctctttgaaagatttgttataa

SEQ ID NO: 104 - protein, 398 aa, Artificial Sequence
  variant of human alpha-galactosidase A
LDNGLARTPPMGWLHWERFMCNLDCQEEPDSCISEKLFEEMAERMVTEGWKDAGYEYLCIDDCWMAPQRDSEGRLQADPQRFPHGIRQLANHVHSKGLKLGIYADVGNKTCAGFPGSFGYYDIDAQTFADWGVDLLKFDGCYCDSLENLADGYKHMSLALNRTGRPIVYSCEWPLYMWPFQKPNYTEIRQYCNHWRNFADIDDSWASIKSILDWTSRNQERIVDVAGPGGWNDPDMLVIGNFGLSWDQQVTQMALWAIMAGPLFMSNDLRAISPQAKALLQDKDVIAINQDPLGKQGYQIRKGDNFEVWERPLSGDAWAVAIINRQEIGGPRSYTIPVASLGKGVACNPACFITQLLPVKRKLGFYEATSRLRSHINPTGTVLLQLENTMQTSLKDLL

SEQ ID NO: 105 - DNA, 1197 bp, Artificial Sequence
  variant of human alpha-galactosidase A
ttggataacgggttagccctgacacctccgatgggttggcttcactgggaaagattcatgtgtaacttagattgccaagaagagcctgacagctgtatctcagagaaactattcgaagagatggctgaacggatggtaaccgatggatggaaggatgctggttatgaatacctatgtattgatgattgctggatggctccagagcgtgattcagaaggtaggttacaagctgacccccagagattcccacatggcatacgtcagcttgcaaaccatgtacacagcaaaggtctaaagttaggcatctacgctgatgtcggaaacaagacatgtgctggtttcccaggttcattcggttactatgacatagatgcgcagacgtttgctgattggggtgttgatttgttgaagtttgatggatgctactgcgattccctggagaacctagccgatgggtacaaacacatgagtttggctctaaacaggactggtaggccgatcgtctatagttgtgaatggcccttgtacatgtggccgtttcagaagccaaactacactgagataagacaatactgtaaccattggcgtaactttgctgacatagatgattcatgggcttcaatcaaatctatcttggattggacttctcgtaaccaggaaagaattgttgatgttgcaggtccaggtggatggaatgaccctgatatgcttgtcatagggaactttgggctatcatgggaccaacaagttacacaaatggctttgtgggcgatcatggccggccccctattcatgtctaatgatctacgtgcgatatcaccccaagcaaaggctttacttcaagataaggatgtcatagcgatcaaccaagatcctcttggtaaacaaggttatcaattgagaaaaggtgacaactttgaagtgtgggaaagaccattgtctggagacgcgtgggctgttgctattatcaaccgtcaagagatcggagggccaagatcttacactatcccggtagcctctttgggtaagggtgttgcgtgcaatcctgcctgcttcattacacaattgcttccagttaagagaaaattgggtttctatgaagcaacctctaggctaagaagtcacattaatcctactggtacggtattgttgcaattggagaacacaatgcaaacctctttgaaagatttgttataa

SEQ ID NO: 106 - protein, 398 aa, Artificial Sequence
  variant of human alpha-galactosidase A
LDNGLALTPPMGWLHWERFMCNLDCQEEPDSCISEKLFEEMAERMVTDGWKDAGYEYLCIDDCWMAPERDSEGRLQADPQRFPHGIRQLANHVHSKGLKLGIYADVGNKTCAGFPGSFGYYDIDAQTFADWGVDLLKFDGCYCDSLENLADGYKHMSLALNRTGRPIVYSCEWPLYMWPFQKPNYTEIRQYCNHWRNFADIDDSWASIKSILDWTSRNQERIVDVAGPGGWNDPDMLVIGNFGLSWDQQVTQMALWAIMAGPLFMSNDLRAISPQAKALLQDKDVIAINQDPLGKQGYQLRKGDNFEVWERPLSGDAWAVAIINRQEIGGPRSYTIPVASLGKGVACNPACFITQLLPVKRKLGFYEATSRLRSHINPTGTVLLQLENTMQTSLKDLL

SEQ ID NO: 107 - DNA, 1197 bp, Artificial Sequence
  variant of human alpha-galactosidase A
ttggataacgggttagcccgtacacctccgatgggttggcttcactgggaaagattcatgtgtaacttagattgccaagaagagcctgacagctgtatctcagagaaactattcgaagagatggctgaacggatggtaaccgatggatggaaggatgctggttatgaatacctatgtattgatgattgctggatggctccacagcgtgattcagaaggtaggttacaagctgacccccagagattcccacatggcatacgtcagcttgcaaaccatgtacacagcaaaggtctaaagttaggcatctacgctgatgtcggaaacaagacatgtgctggtttcccaggttcatttggttactatgacatagatgcgcagacgtttgctgattggggtgttgatttgttgaagtttgatggatgctactgcgattcgctggagaacctagccgatgggtacaaacacatgagtttggctctaaacaggactggtaggccgatcgtctatagttgtgaatggcccttgtacatgtggccgggtcagaagccaaactacactgagataagacaatactgtaaccattggcgtaactttgctgacatagatgattcatgggcttcaatcaaatctatcttggattggacttctcgtaaccaggaaagaattgttgatgttgcaggtccaggtggatggaatgaccctgatatgcttgtcatagggaactttgggctatcatgggaccaacaagttacacaaatggctttgtgggcgatcatggccggccccctattcatgtctaatgatctacgtgcgatatcaccccaagcaaaggctttacttcaaaacaaggatgtcatagcgatcaaccaagatcctcttggtaaacaaggttatcaattgagaaaaggtgacaactttgaagtgtgggaaagaccattgtctggagacgcgtgggctgttgctattatcaaccgtcaagagatcggagggccaagatcttacactatcccggtagcctctttgggtaagggtgttgcgtgcaatcctgcctgcttcattacacaattgcttccagttaagagaaaattgggtttctatgaagcaacctctaggctaagaagtcacattaatcctactggtacggtattgttgcaattggagaacacaatgcaaacctctttgaaagatttgttataa

SEQ ID NO: 108 - protein, 398 aa, Artificial Sequence
  variant of human alpha-galactosidase A
LDNGLARTPPMGWLHWERFMCNLDCQEEPDSCISEKLFEEMAERMVTDGWKDAGYEYLCIDDCWMAPQRDSEGRLQADPQRFPHGIRQLANHVHSKGLKLGIYADVGNKTCAGFPGSFGYYDIDAQTFADWGVDLLKFDGCYCDSLENLADGYKHMSLALNRTGRPIVYSCEWPLYMWPGQKPNYTEIRQYCNHWRNFADIDDSWASIKSILDWTSRNQERIVDVAGPGGWNDPDMLVIGNFGLSWDQQVTQMALWAIMAGPLFMSNDLRAISPQAKALLQNKDVIAINQDPLGKQGYQLRKGDNFEVWERPLSGDAWAVAIINRQEIGGPRSYTIPVASLGKGVACNPACFITQLLPVKRKLGFYEATSRLRSHINPTGTVLLQLENTMQTSLKDLL

SEQ ID NO: 109 - DNA, 1197 bp, Artificial Sequence
  variant of human alpha-galactosidase A
ttggataacgggttagcccgtacacctccgatgggttggcttcactgggaaagattcatgtgtaacttagattgccaagaagagcctgacagctgtatctcagagaaactattcgaagagatggctgaacggatggtaaccgaaggatggaaggatgctggttatgaatacctatgtattgatgattgctggatggctccacagcgtgattcagaaggtaggttacaagctgacccccagagattcccacatggcatacgtcagcttgcaaaccatgtacacagcaaaggtctaaagttaggcatctacgctgatgtcggaaacaagacatgtgctggtttcccaggttcatttggttactatgacatagatgcgcagacgtttgctgattggggtgttgatttgttgaagtttgatggatgctactgcgattccctggagaacctagccgatgggtacaaacacatgagtttggctctaaacaggactggtaggccgatcgtctatagttgtgaatggcccttgtacatgtggccgggtcagaagccaaactacactgagataagacaatactgtaaccattggcgtaactttgctgacatagatgattcatgggcttcaatcaaatctatcttggattggacttctcgtaaccaggaaagaattgttgatgttgcaggtccaggtggatggaatgaccctgatatgcttgtcatagggaactttgggctatcatgggaccaacaagttacacaaatggctttgtgggcgatcatggccggccccctattcatgtctaatgatctacgtgcgatatcaccccaagcaaaggctttacttcaagataaggatgtcatagcgatcaaccaagatcctcttggtaaacaaggttatcaattgagaaaaggtgacaactttgaagtgtgggaaagaccattgtctggagacgcgtgggctgttgctattatcaaccgtcaagagatcggagggccaagatcttacactatcccggtagcctctttgggtaagggtgttgcgtgcaatcctgcctgcttcattacacaattgcttccagttaagagaaaattgggtttctatgaagcaacctctaggctaagaagtcacattaatcctactggtacggtattgttgcaattggagaacacaatgcaaacctctttgaaagatttgttataa

SEQ ID NO: 110 - protein, 398 aa, Artificial Sequence
  variant of human alpha-galactosidase A
LDNGLARTPPMGWLHWERFMCNLDCQEEPDSCISEKLFEEMAERMVTEGWKDAGYEYLCIDDCWMAPQRDSEGRLQADPQRFPHGIRQLANHVHSKGLKLGIYADVGNKTCAGFPGSFGYYDIDAQTFADWGVDLLKFDGCYCDSLENLADGYKHMSLALNRTGRPIVYSCEWPLYMWPGQKPNYTEIRQYCNHWRNFADIDDSWASIKSILDWTSRNQERIVDVAGPGGWNDPDMLVIGNFGLSWDQQVTQMALWAIMAGPLFMSNDLRAISPQAKALLQDKDVIAINQDPLGKQGYQLRKGDNFEVWERPLSGDAWAVAIINRQEIGGPRSYTIPVASLGKGVACNPACFITQLLPVKRKLGFYEATSRLRSHINPTGTVLLQLENTMQTSLKDLL

SEQ ID NO: 111 - DNA, 1197 bp, Artificial Sequence
  variant of human alpha-galactosidase A
ttggataacgggttagcccgtacacctccgatgggttggcttcactgggaaagattcatgtgtaacttagattgccaagaagagcctgacagctgtatctcagagaaactattcgaagagatggctgaacggatggtaaccgaaggatggaaggatgctggttatgaatacctatgtattgatgattgctggatggctccacagcgtgattcagaaggtaggttacaagctgacccccagagattcccacatggcatacgtcagcttgcaaaccatgtacacagcaaaggtctaaagttaggcatctacgctgatgtcggaaacaagacatgtgctggtttcccaggttcattcggttactatgacatagatgcgcagacgtttgctgattggggtgttgatttgttgaagtttgatggatgctactgcgattccctggagaacctagccgatgggtacaaacacatgagtttggctctaaacaggactggtaggccgatcgtctatagttgtgaatggcccttgtacatgtggccgtttcagaagccaaactacactgagataagacaatactgtaaccattggcgtaactttgctgacatagatgattcatgggcttcaatcaaatctatcttggattggacttctcgtaaccaggaaagaattgttgatgttgcaggtccaggtggatggaatgaccctgatatgcttgtcatagggaactttgggctatcatgggaccaacaagttacacaaatggctttgtgggcgatcatggccggccccctattcatgtctaatgatctacgtgcgatatcaccccaagcaaaggctttacttcaagataaggatgtcatagcgatcaaccaagatcctcttggtaaacaaggttatcgtatcagaaaaggtgacgggtttgaagtgtgggaaagaccattgtctggagacgcgtgggctgttgctattatcaaccgtcaagagatcggagggccaagatcttacactatcccggtagcctctttgggtaagggtgttgcgtgcaatcctgcctgcttcattacacaattgcttccagttaagagaaaattgggtgtctatgaagcaacctctaggctaagaagtcacattaatcctactggtacggtattgttgcaattggagaacacaatgcaaacctctttgaaagatttgttataa

SEQ ID NO: 112 - protein, 398 aa, Artificial Sequence
  variant of human alpha-galactosidase A
LDNGLARTPPMGWLHWERFMCNLDCQEEPDSCISEKLFEEMAERMVTEGWKDAGYEYLCIDDCWMAPQRDSEGRLQADPQRFPHGIRQLANHVHSKGLKLGIYADVGNKTCAGFPGSFGYYDIDAQTFADWGVDLLKFDGCYCDSLENLADGYKHMSLALNRTGRPIVYSCEWPLYMWPFQKPNYTEIRQYCNHWRNFADIDDSWASIKSILDWTSRNQERIVDVAGPGGWNDPDMLVIGNFGLSWDQQVTQMALWAIMAGPLFMSNDLRAISPQAKALLQDKDVIAINQDPLGKQGYRIRKGDGFEVWERPLSGDAWAVAIINRQEIGGPRSYTIPVASLGKGVACNPACFITQLLPVKRKLGVYEATSRLRSHINPTGTVLLQLENTMQTSLKDLL

SEQ ID NO: 113 - DNA, 1197 bp, Artificial Sequence
  variant of human alpha-galactosidase A
ttggataacgggttagcccgtacacctccgatgggttggcttcactgggaaagattcatgtgtaacttagattgccaagaagagcctgacagctgtatctcagagaaactattcgaagagatggctgaacggatggtaaccgaaggatggaaggatgctggttatgaatacctatgtattgatgattgctggatggctccacagcgtgattcagaaggtaggttacaagctgacccccagagattcccacatggcatacgtcagcttgcaaaccatgtacacagcaaaggtctaaagttaggcatctacgctgatgtcggaaacaagacatgtgctggtttcccaggttcattcggttactatgacatagatgcgcagacgtttgctgattggggtgttgatttgttgaagtttgatggatgctactgcgattccctggagaacctagccgatgggtacaaacacatgagtttggctctaaacaggactggtaggccgatcgtctatagttgtgaatggcccttgtacatgtggccgtttcagaagccaaactacactgagataagacaatactgtaaccattggcgtaactttgctgacatagatgattcatgggcttcaatcaaatctatcttggattggacttctcgtaaccaggaaagaattgttgatgttgcaggtccaggtggatggaatgaccctgatatgcttgtcatagggaactttgggctatcatgggaccaacaagttacacaaatggctttgtgggcgatcatggccggccccctattcatgtctaatgatctacgtgcgatatcaccccaagcaaaggctttacttcaaaacaaggatgtcatagcgatcaaccaagatcctcttggtaaacaaggttatcaattgagaaaaggtgacaactttgaagtgtgggaaagaccattgtctggagacgcgtgggctgttgctattatcaaccgtcaagagatcggagggccaagatcttacactatcccggtagcctctttgggtaagggtgttgcgtgcaatcctgcctgcttcattacacaattgcttccagttaagagaaaattgggtgtctatgaagcaacctctaggctaagaagtcacattaatcctactggtacggtattgttgcaattggagaacacaatgcaaacctctttgaaagatttgttataa

SEQ ID NO: 114 - protein, 398 aa, Artificial Sequence
  variant of human alpha-galactosidase A
LDNGLARTPPMGWLHWERFMCNLDCQEEPDSCISEKLFEEMAERMVTEGWKDAGYEYLCIDDCWMAPQRDSEGRLQADPQRFPHGIRQLANHVHSKGLKLGIYADVGNKTCAGFPGSFGYYDIDAQTFADWGVDLLKFDGCYCDSLENLADGYKHMSLALNRTGRPIVYSCEWPLYMWPFQKPNYTEIRQYCNHWRNFADIDDSWASIKSILDWTSRNQERIVDVAGPGGWNDPDMLVIGNFGLSWDQQVTQMALWAIMAGPLFMSNDLRAISPQAKALLQNKDVIAINQDPLGKQGYQLRKGDNFEVWERPLSGDAWAVAIINRQEIGGPRSYTIPVASLGKGVACNPACFITQLLPVKRKLGVYEATSRLRSHINPTGTVLLQLENTMQTSLKDLL

SEQ ID NO: 115 - DNA, 1197 bp, Artificial Sequence
  variant of human alpha-galactosidase A
ttggataacgggttagcccgtacacctccgatgggttggcttcactgggaaagattcatgtgtaacttagattgccaagaagagcctgacagctgtatctcagagaaactattcgaagagatggctgaacggatggtaaccgatggatggaaggatgctggttatgaatacctatgtattgatgattgctggatggctccacagcgtgattcagaaggtaggttacaagctgacccccagagattcccacatggcatacgtcagcttgcaaaccatgtacacagcaaaggtctaaagttaggcatctacgctgatgtcggaaacaagacatgtgctggtttcccaggttcattcggttactatgacatagatgcgcagacgtttgctgattggggtgttgatttgttgaagtttgatggatgctactgcgattccctggagaacctagccgatgggtacaaacacatgagtttggctctaaacaggactggtaggccgatcgtctatagttgtgaatggcccttgtacatgtggccgtttcagaagccaaactacactgagataagacaatactgtaaccattggcgtaactttgctgacatagatgattcatgggcttcaatcaaatctatcttggattggacttctcgtaaccaggaaagaattgttgatgttgcaggtccaggtggatggaatgaccctgatatgcttgtcatagggaactttgggctatcatgggaccaacaagttacacaaatggctttgtgggcgatcatggccggccccctattcatgtctaatgatctacgtgcgatatcaccccaagcaaaggctttacttcaaaacaaggatgtcatagcgatcaaccaagatcctcttggtaaacaaggttatcaactgagaaaaggtgacgggtttgaagtgtgggaaagaccattgtctggagacgcgtgggctgttgctattatcaaccgtcaagagatcggagggccaagatcttacactatcccggtagcctctttgggtaagggtgttgcgtgcaatcctgcctgcttcattacacaattgcttccagttaagagaaaattgggtttctatgaagcaacctctaggctaagaagtcacattaatcctactggtacggtattgttgcaattggagaacacaatgcaaacctctttgaaagatttgttataa

SEQ ID NO: 116 - protein, 398 aa, Artificial Sequence
  variant of human alpha-galactosidase A
LDNGLARTPPMGWLHWERFMCNLDCQEEPDSCISEKLFEEMAERMVTDGWKDAGYEYLCIDDCWMAPQRDSEGRLQADPQRFPHGIRQLANHVHSKGLKLGIYADVGNKTCAGFPGSFGYYDIDAQTFADWGVDLLKFDGCYCDSLENLADGYKHMSLALNRTGRPIVYSCEWPLYMWPFQKPNYTEIRQYCNHWRNFADIDDSWASIKSILDWTSRNQERIVDVAGPGGWNDPDMLVIGNFGLSWDQQVTQMALWAIMAGPLFMSNDLRAISPQAKALLQNKDVIAINQDPLGKQGYQLRKGDGFEVWERPLSGDAWAVAIINRQEIGGPRSYTIPVASLGKGVACNPACFITQLLPVKRKLGFYEATSRLRSHINPTGTVLLQLENTMQTSLKDLL

SEQ ID NO: 117 - DNA, 1197 bp, Artificial Sequence
  variant of human alpha-galactosidase A
ttggataacgggttagccctgacacctccgatgggttggcttcactgggaaagattcatgtgtaacttagattgccaagaagagcctgacagctgtatctcagagaaactattcgaagagatggctgaacggatggtaaccgaaggatggaaggatgctggttatgaatacctatgtattgatgattgctggatggctccagagcgtgattcagaaggtaggttacaagctgacccccagagattcccacatggcatacgtcagcttgcaaaccatgtacacagcaaaggtctaaagttaggcatctacgctgatgtcggaaacaagacatgtgctggtttcccaggttcattcggttactatgacatagatgcgcagacgtttgctgattggggtgttgatttgttgaagtttgatggatgctactgcgattccctggagaacctagccgatgggtacaaacacatgagtttggctctaaacaggactggtaggccgatcgtctatagttgtgaatggcccttgtacatgtggccgggtcagaagccaaactacactgagataagacaatactgtaaccattggcgtaactttgctgacatagatgattcatgggcttcaatcaaatctatcttggattggacttctcgtaaccaggaaagaattgttgatgttgcaggtccaggtggatggaatgaccctgatatgcttgtcatagggaactttgggctatcatgggaccaacaagttacacaaatggctttgtgggcgatcatggccggccccctattcatgtctaatgatctacgtgcgatatcaccccaagcaaaggctttacttcaagataaggatgtcatagcgatcaaccaagatcctcttggtaaacaaggttatcaattgagaaaaggtgacaactttgaagtgtgggaaagaccattgtctggagacgcgtgggctgttgctattatcaaccgtcaagagatcggagggccaagatcttacactatcccggtagcctctttgggtaagggtgttgcgtgcaatcctgcctgcttcattacacaattgcttccagttaagagaaaattgggtttctatgaagcaacctctaggctaagaagtcacattaatcctactggtacggtattgttgcaattggagaacacaatgcaaacctctttgaaagatttgttataa

SEQ ID NO: 118 - protein, 398 aa, Artificial Sequence
  variant of human alpha-galactosidase A
LDNGLALTPPMGWLHWERFMCNLDCQEEPDSCISEKLFEEMAERMVTEGWKDAGYEYLCIDDCWMAPERDSEGRLQADPQRFPHGIRQLANHVHSKGLKLGIYADVGNKTCAGFPGSFGYYDIDAQTFADWGVDLLKFDGCYCDSLENLADGYKHMSLALNRTGRPIVYSCEWPLYMWPGQKPNYTEIRQYCNHWRNFADIDDSWASIKSILDWTSRNQERIVDVAGPGGWNDPDMLVIGNFGLSWDQQVTQMALWAIMAGPLFMSNDLRAISPQAKALLQDKDVIAINQDPLGKQGYQLRKGDNFEVWERPLSGDAWAVAIINRQEIGGPRSYTIPVASLGKGVACNPACFITQLLPVKRKLGFYEATSRLRSHINPTGTVLLQLENTMQTSLKDLL

SEQ ID NO: 119 - DNA, 1197 bp, Artificial Sequence
  variant of human alpha-galactosidase A
ttggataacgggttagcccgtacacctccgatgggttggcttcactgggaaagattcatgtgtaacttagattgccaagaagagcctgacagctgtatctcagagaaactattcgaagagatggctgaacggatggtaaccgaaggatggaaggatgctggttatgaatacctatgtattgatgattgctggatggctccacagcgtgattcagaaggtaggttacaagctgacccccagagattcccacatggcatacgtcagcttgcaaaccatgtacacagcaaaggtctaaagttaggcatctacgctgatgtcggaaacaagacatgtgctggtttcccaggttcattcggttactatgacatagatgcgcagacgtttgctgattggggtgttgatttgttgaagtttgatggatgctactgcgattccctggagaacctagccgatgggtacaaacacatgagtttggctctaaacaggactggtaggccgatcgtctatagttgtgaatggcccttgtacatgtggccgtttcagaagccaaactacactgagataagacaatactgtaaccattggcgtaactttgctgacatagatgattcatgggcttcaatcaaatctatcttggattggacttctcgtaaccaggaaagaattgttgatgttgcaggtccaggtggatggaatgaccctgatatgcttgtcatagggaactttgggctatcatgggaccaacaagttacacaaatggctttgtgggcgatcatggccggccccctattcatgtctaatgatctacgtgcgatatcaccccaagcaaaggctttacttcaagacaaggatgtcatagcgatcaaccaagatcctcttggtaaacaaggttatcaactgagaaaaggtgacgggtttgaagtgtgggaaagaccattgtctggagacgcgtgggctgttgctattatcaaccgtcaagagatcggagggccaagatcttacactatcccggtagcctctttgggtaagggtgttgcgtgcaatcctgcctgcttcattacacaattgcttccagttaagagaaaattgggtttctatgaagcaacctctaggctaagaagtcacattaatcctactggtacggtattgttgcaattggagaacacaatgcaaacctctttgaaagatttgttataa

SEQ ID NO: 120 - protein, 398 aa, Artificial Sequence
  variant of human alpha-galactosidase A
LDNGLARTPPMGWLHWERFMCNLDCQEEPDSCISEKLFEEMAERMVTEGWKDAGYEYLCIDDCWMAPQRDSEGRLQADPQRFPHGIRQLANHVHSKGLKLGIYADVGNKTCAGFPGSFGYYDIDAQTFADWGVDLLKFDGCYCDSLENLADGYKHMSLALNRTGRPIVYSCEWPLYMWPFQKPNYTEIRQYCNHWRNFADIDDSWASIKSILDWTSRNQERIVDVAGPGGWNDPDMLVIGNFGLSWDQQVTQMALWAIMAGPLFMSNDLRAISPQAKALLQDKDVIAINQDPLGKQGYQLRKGDGFEVWERPLSGDAWAVAIINRQEIGGPRSYTIPVASLGKGVACNPACFITQLLPVKRKLGFYEATSRLRSHINPTGTVLLQLENTMQTSLKDLL

SEQ ID NO: 121 - DNA, 1197 bp, Artificial Sequence
  variant of human alpha-galactosidase A
ttggataacgggttagcccgtacacctccgatgggttggcttcactgggaaagattcatgtgtaacttagattgccaagaagagcctgacagctgtatctcagagaaactattcgaagagatggctgaacggatggtaaccgaaggatggaaggatgctggttatgaatacctatgtattgatgattgctggatggctccagagcgtgattcagaaggtaggttacaagctgacccccagagattcccacatggcatacgtcagcttgcaaaccatgtacacagcaaaggtctaaagttaggcatctacgctgatgtcggaaacaagacatgtgctggtttcccaggttcattcggttactatgacatagatgcgcagacgtttgctgattggggtgttgatttgttgaagtttgatggatgctactgcgattcgctggagaacctagccgatgggtacaaacacatgagtttggctctaaacaggactggtaggccgatcgtctatagttgtgaatggcccttgtacatgtggccgtttcagaagccaaactacactgagataagacaatactgtaaccattggcgtaactttgctgacatagatgattcatgggcttcaatcaaatctatcttggattggacttctcgtaaccaggaaagaattgttgatgttgcaggtccaggtggatggaatgaccctgatatgcttgtcatagggaactttgggctatcatgggaccaacaagttacacaaatggctttgtgggcgatcatggccggccccctattcatgtctaatgatctacgtgcgatatcaccccaagcaaaggctttacttcaagataaggatgtcatagcgatcaaccaagatcctcttggtaaacaaggttatcgtatcagaaaaggtgacaattttgaagtgtgggaaagaccattgtctggagacgcgtgggctgttgctattatcaaccgtcaagagatcggagggccaagatcttacactatcccggtagcctctttgggtaagggtgttgcgtgcaatcctgcctgcttcattacacaattgcttccagttaagagaaaattgggtttctatgaagcaacctctaggctaagaagtcacattaatcctactggtacggtattgttgcaattggagaacacaatgcaaacctctttgaaagatttgttataa

SEQ ID NO: 122 - protein, 398 aa, Artificial Sequence
  variant of human alpha-galactosidase A
LDNGLARTPPMGWLHWERFMCNLDCQEEPDSCISEKLFEEMAERMVTEGWKDAGYEYLCIDDCWMAPERDSEGRLQADPQRFPHGIRQLANHVHSKGLKLGIYADVGNKTCAGFPGSFGYYDIDAQTFADWGVDLLKFDGCYCDSLENLADGYKHMSLALNRTGRPIVYSCEWPLYMWPFQKPNYTEIRQYCNHWRNFADIDDSWASIKSILDWTSRNQERIVDVAGPGGWNDPDMLVIGNFGLSWDQQVTQMALWAIMAGPLFMSNDLRAISPQAKALLQDKDVIAINQDPLGKQGYRIRKGDNFEVWERPLSGDAWAVAIINRQEIGGPRSYTIPVASLGKGVACNPACFITQLLPVKRKLGFYEATSRLRSHINPTGTVLLQLENTMQTSLKDLL

SEQ ID NO: 123 - DNA, 1197 bp, Artificial Sequence
  variant of human alpha-galactosidase A
ttggataacgggttagccctgacacctccgatgggttggcttcactgggaaagattcatgtgtaacttagattgccaagaagagcctgacagctgtatctcagagaaactattcgaagagatggctgaacggatggtaaccgatggatggaaggatgctggttatgaatacctatgtattgatgattgctggatggctccacagcgtgattcagaaggtaggttacaagctgacccccagagattcccacatggcatacgtcagcttgcaaaccatgtacacagcaaaggtctaaagttaggcatctacgctgatgtcggaaacaagacatgtgctggtttcccaggttcattcggttactatgacatagatgcgcagacgtttgctgagtggggtgttgatttgttgaagtttgatggatgctactgcgattcgctggagaacctagccgatgggtacaaacacatgagtttggctctaaacaggactggtaggccgatcgtctatagttgtgaatggcccttgtacatgtggccgtttcagaagccaaactacactgagataagacaatactgtaaccattggcgtaactttgctgacatagatgattcatgggcttcaatcaaatctatcttggattggacttctcgtaaccaggaaagaattgttgatgttgcaggtccaggtggatggaatgaccctgatatgcttgtcatagggaactttgggctatcatgggaccaacaagttacacaaatggctttgtgggcgatcatggccggccccctattcatgtctaatgatctacgtgcgatatcaccccaagcaaaggctttacttcaaaacaaggatgtcatagcgatcaaccaagatcctcttggtaaacaaggttatcaattgagaaaaggtgacaactttgaagtgtgggaaagaccattgtctggagacgcgtgggctgttgctattatcaaccgtcaagagatcggagggccaagatcttacactatcccggtagcctctttgggtaagggtgttgcgtgcaatcctgcctgcttcattacacaattgcttccagttaagagaaaattgggtttctatgaagcaacctctaggctaagaagtcacattaatcctactggtacggtattgttgcaattggagaacacaatgcaaacctctttgaaagatttgttataa

SEQ ID NO: 124 - protein, 398 aa, Artificial Sequence
  variant of human alpha-galactosidase A
LDNGLALTPPMGWLHWERFMCNLDCQEEPDSCISEKLFEEMAERMVTDGWKDAGYEYLCIDDCWMAPQRDSEGRLQADPQRFPHGIRQLANHVHSKGLKLGIYADVGNKTCAGFPGSFGYYDIDAQTFAEWGVDLLKFDGCYCDSLENLADGYKHMSLALNRTGRPIVYSCEWPLYMWPFQKPNYTEIRQYCNHWRNFADIDDSWASIKSILDWTSRNQERIVDVAGPGGWNDPDMLVIGNFGLSWDQQVTQMALWAIMAGPLFMSNDLRAISPQAKALLQNKDVIAINQDPLGKQGYQLRKGDNFEVWERPLSGDAWAVAIINRQEIGGPRSYTIPVASLGKGVACNPACFITQLLPVKRKLGFYEATSRLRSHINPTGTVLLQLENTMQTSLKDLL

SEQ ID NO: 125 - DNA, 1197 bp, Artificial Sequence
  variant of human alpha-galactosidase A
ttggataacgggttagcccgtacacctccgatgggttggcttcactgggaaagattcatgtgtaacttagattgccaagaagagcctgacagctgtatctcagagaaactattcgaagagatggctgaacggatggtaaccgatggatggaaggatgctggttatgaatacctatgtattgatgattgctggatggctccagagcgtgattcagaaggtaggttacaagctgacccccagagattcccacatggcatacgtcagcttgcaaaccatgtacacagcaaaggtctaaagttaggcatctacgctgatgtcggaaacaagacatgtgctggtttcccaggttcattcggttactatgacatagatgcgcagacgtttgctgattggggtgttgatttgttgaagtttgatggatgctactgcgattccctggagaacctagccgatgggtacaaacacatgagtttggctctaaacaggactggtaggccgatcgtctatagttgtgaatggcccttgtacatgtggccgtttcagaagccaaactacactgagataagacaatactgtaaccattggcgtaactttgctgacatagatgattcatgggcttcaatcaaatctatcttggattggacttctcgtaaccaggaaagaattgttgatgttgcaggtccaggtggatggaatgaccctgatatgcttgtcatagggaactttgggctatcatgggaccaacaagttacacaaatggctttgtgggcgatcatggccggccccctattcatgtctaatgatctacgtgcgatatcaccccaagcaaaggctttacttcaagataaggatgtcatagcgatcaaccaagatcctcttggtaaacaaggttatcaattgagaaaaggtgacaactttgaagtgtgggaaagaccattgtctggagacgcgtgggctgttgctattatcaaccgtcaagagatcggagggccaagatcttacactatcccggtagcctctttgggtaagggtgttgcgtgcaatcctgcctgcttcattacacaattgcttccagttaagagaaaattgggtttctatgaagcaacctctaggctaagaagtcacattaatcctactggtacggtattgttgcaattggagaacacaatgcaaacctctttgaaagatttgttataa

SEQ ID NO: 126 - protein, 398 aa, Artificial Sequence
  variant of human alpha-galactosidase A
LDNGLARTPPMGWLHWERFMCNLDCQEEPDSCISEKLFEEMAERMVTDGWKDAGYEYLCIDDCWMAPERDSEGRLQADPQRFPHGIRQLANHVHSKGLKLGIYADVGNKTCAGFPGSFGYYDIDAQTFADWGVDLLKFDGCYCDSLENLADGYKHMSLALNRTGRPIVYSCEWPLYMWPFQKPNYTEIRQYCNHWRNFADIDDSWASIKSILDWTSRNQERIVDVAGPGGWNDPDMLVIGNFGLSWDQQVTQMALWAIMAGPLFMSNDLRAISPQAKALLQDKDVIAINQDPLGKQGYQLRKGDNFEVWERPLSGDAWAVAIINRQEIGGPRSYTIPVASLGKGVACNPACFITQLLPVKRKLGFYEATSRLRSHINPTGTVLLQLENTMQTSLKDLL

SEQ ID NO: 127 - DNA, 1197 bp, Artificial Sequence
  variant of human alpha-galactosidase A
ttggataacgggttagcccgtacacctccgatgggttggcttcactgggaaagattcatgtgtaacttagattgccaagaagagcctgacagctgtatctcagagaaactattcgaagagatggctgaacggatggtaaccgaaggatggaaggatgctggttatgaatacctatgtattgatgattgctggatggctccacagcgtgattcagaaggtaggttacaagctgacccccagagattcccacatggcatacgtcagcttgcaaaccatgtacacagcaaaggtctaaagttaggcatctacgctgatgtcggaaacaagacatgtgctggtttcccaggttcattcggttactatgacatagatgcgcagacgtttgctgattggggtgttgatttgttgaagtttgatggatgctactgcgattccctggagaacctagccgatgggtacaaacacatgagtttggctctaaacaggactggtaggccgatcgtctatagttgtgaatggcccttgtacatgtggccgtttcagaagccaaactacactgagataagacaatactgtaaccattggcgtaactttgctgacatagatgattcatgggcttcaatcaaatctatcttggattggacttctcgtaaccaggaaagaattgttgatgttgcaggtccaggtggatggaatgaccctgatatgcttgtcatagggaactttgggctatcatgggaccaacaagttacacaaatggctttgtgggcgatcatggccggccccctattcatgtctaatgatctacgtgcgatatcaccccaagcaaaggctttacttcaagacaaggatgtcatagcgatcaaccaagatcctcttggtaaacaaggttatcaattgagaaaaggtgacgggtttgaagtgtgggaaagaccattgtctggagacgcgtgggctgttgctattatcaaccgtcaagagatcggagggccaagatcttacactatcccggtagcctctttgggtaagggtgttgcgtgcaatcctgcctgcttcattacacaattgcttccagttaagagaaaattgggtgtctatgaagcaacctctaggctaagaagtcacattaatcctactggtacggtattgttgcaattggagaacacaatgcaaacctctttgaaagatttgttataa

SEQ ID NO: 128 - protein, 398 aa, Artificial Sequence
  variant of human alpha-galactosidase A
LDNGLARTPPMGWLHWERFMCNLDCQEEPDSCISEKLFEEMAERMVTEGWKDAGYEYLCIDDCWMAPQRDSEGRLQADPQRFPHGIRQLANHVHSKGLKLGIYADVGNKTCAGFPGSFGYYDIDAQTFADWGVDLLKFDGCYCDSLENLADGYKHMSLALNRTGRPIVYSCEWPLYMWPFQKPNYTEIRQYCNHWRNFADIDDSWASIKSILDWTSRNQERIVDVAGPGGWNDPDMLVIGNFGLSWDQQVTQMALWAIMAGPLFMSNDLRAISPQAKALLQDKDVIAINQDPLGKQGYQLRKGDGFEVWERPLSGDAWAVAIINRQEIGGPRSYTIPVASLGKGVACNPACFITQLLPVKRKLGVYEATSRLRSHINPTGTVLLQLENTMQTSLKDLL

SEQ ID NO: 129 - DNA, 1197 bp, Artificial Sequence
  variant of human alpha-galactosidase A
ttggataacgggttagccctgacacctccgatgggttggcttcactgggaaagattcatgtgtaacttagattgccaagaagagcctgacagctgtatctcagagaaactattcgaagagatggctgaacggatggtaaccgaaggatggaaggatgctggttatgaatacctatgtattgatgattgctggatggctccacagcgtgattcagaaggtaggttacaagctgacccccagagattcccacatggcatacgtcagcttgcaaaccatgtacacagcaaaggtctaaagttaggcatctacgctgatgtcggaaacaagacatgtgctggtttcccaggttcattcggttactatgacatagatgcgcagacgtttgctgattggggtgttgatttgttgaagtttgatggatgctactgcgattccctggagaacctagccgatgggtacaaacacatgagtttggctctaaacaggactggtaggccgatcgtctatagttgtgaatggcccttgtacatgtggccgtttcagaagccaaactacactgagataagacaatactgtaaccattggcgtaactttgctgacatagatgattcatgggcttcaatcaaatctatcttggattggacttctcgtaaccaggaaagaattgttgatgttgcaggtccaggtggatggaatgaccctgatatgcttgtcatagggaactttgggctatcatgggaccaacaagttacacaaatggctttgtgggcgatcatggccggccccctattcatgtctaatgatctacgtgcgatatcaccccaagcaaaggctttacttcaaaacaaggatgtcatagcgatcaaccaagatcctcttggtaaacaaggttatcaattgagaaaaggtgacaactttgaagtgtgggaaagaccattgtctggagacgcgtgggctgttgctattatcaaccgtcaagagatcggagggccaagatcttacactatcccggtagcctctttgggtaagggtgttgcgtgcaatcctgcctgcttcattacacaattgcttccagttaagagaaaattgggtttctatgaagcaacctctaggctaagaagtcacattaatcctactggtacggtattgttgcaattggagaacacaatgcaaacctctttgaaagatttgttataa

SEQ ID NO: 130 - protein, 398 aa, Artificial Sequence
  variant of human alpha-galactosidase A
LDNGLALTPPMGWLHWERFMCNLDCQEEPDSCISEKLFEEMAERMVTEGWKDAGYEYLCIDDCWMAPQRDSEGRLQADPQRFPHGIRQLANHVHSKGLKLGIYADVGNKTCAGFPGSFGYYDIDAQTFADWGVDLLKFDGCYCDSLENLADGYKHMSLALNRTGRPIVYSCEWPLYMWPFQKPNYTEIRQYCNHWRNFADIDDSWASIKSILDWTSRNQERIVDVAGPGGWNDPDMLVIGNFGLSWDQQVTQMALWAIMAGPLFMSNDLRAISPQAKALLQNKDVIAINQDPLGKQGYQLRKGDNFEVWERPLSGDAWAVAIINRQEIGGPRSYTIPVASLGKGVACNPACFITQLLPVKRKLGFYEATSRLRSHINPTGTVLLQLENTMQTSLKDLL

SEQ ID NO: 131 - DNA, 1197 bp, Artificial Sequence
  variant of human alpha-galactosidase A
ttggataacgggttagccctgacacctccgatgggttggcttcactgggaaagattcatgtgtaacttagattgccaagaagagcctgacagctgtatctcagagaaactattcgaagagatggctgaacggatggtaaccgaaggatggaaggatgctggttatgaatacctatgtattgatgattgctggatggctccagagcgtgattcagaaggtaggttacaagctgacccccagagattcccacatggcatacgtcagcttgcaaaccatgtacacagcaaaggtctaaagttaggcatctacgctgatgtcggaaacaagacatgtgctggtttcccaggttcattcggttactatgacatagatgcgcagacgtttgctgagtggggtgttgatttgttgaagtttgatggatgctactgcgattccctggagaacctagccgatgggtacaaacacatgagtttggctctaaacaggactggtaggccgatcgtctatagttgtgaatggcccttgtacatgtggccgtttcagaagccaaactacactgagataagacaatactgtaaccattggcgtaactttgctgacatagatgattcatgggcttcaatcaaatctatcttggattggacttctcgtaaccaggaaagaattgttgatgttgcaggtccaggtggatggaatgaccctgatatgcttgtcatagggaactttgggctatcatgggaccaacaagttacacaaatggctttgtgggcgatcatggccggccccctattcatgtctaatgatctacgtgcgatatcaccccaagcaaaggctttacttcaaaacaaggatgtcatagcgatcaaccaagatcctcttggtaaacaaggttatcaattgagaaaaggtgacaactttgaagtgtgggaaagaccattgtctggagacgcgtgggctgttgctattatcaaccgtcaagagatcggagggccaagatcttacactatcccggtagcctctttgggtaagggtgttgcgtgcaatcctgcctgcttcattacacaattgcttccagttaagagaaaattgggtgtctatgaagcaacctctaggctaagaagtcacattaatcctactggtacggtattgttgcaattggagaacacaatgcaaacctctttgaaagatttgttataa

SEQ ID NO: 132 - protein, 398 aa, Artificial Sequence
  variant of human alpha-galactosidase A
LDNGLALTPPMGWLHWERFMCNLDCQEEPDSCISEKLFEEMAERMVTEGWKDAGYEYLCIDDCWMAPERDSEGRLQADPQRFPHGIRQLANHVHSKGLKLGIYADVGNKTCAGFPGSFGYYDIDAQTFAEWGVDLLKFDGCYCDSLENLADGYKHMSLALNRTGRPIVYSCEWPLYMWPFQKPNYTEIRQYCNHWRNFADIDDSWASIKSILDWTSRNQERIVDVAGPGGWNDPDMLVIGNFGLSWDQQVTQMALWAIMAGPLFMSNDLRAISPQAKALLQNKDVIAINQDPLGKQGYQLRKGDNFEVWERPLSGDAWAVAIINRQEIGGPRSYTIPVASLGKGVACNPACFITQLLPVKRKLGVYEATSRLRSHINPTGTVLLQLENTMQTSLKDLL

SEQ ID NO: 133 - DNA, 1197 bp, Artificial Sequence
  variant of human alpha-galactosidase A
ttggataacgggttagcccgtacacctccgatgggttggcttcactgggaaagattcatgtgtaacttagattgccaagaagagcctgacagctgtatctcagagaaactattcgaagagatggctgaacggatggtaaccgatggatggaaggatgctggttatgaatacctatgtattgatgattgctggatggctccacagcgtgattcagaaggtaggttacaagctgacccccagagattcccacatggcatacgtcagcttgcaaaccatgtacacagcaaaggtctaaagttaggcatctacgctgatgtcggaaacaagacatgtgctggtttcccaggttcattcggttactatgacatagatgcgcagacgtttgctgattggggtgttgatttgttgaagtttgatggatgctactgcgattccctggagaacctagccgatgggtacaaacacatgagtttggctctaaacaggactggtaggccgatcgtctatagttgtgaatggcccttgtacatgtggccgtttcagaagccaaactacactgagataagacaatactgtaaccattggcgtaactttgctgacatagatgattcatgggcttcaatcaaatctatcttggattggacttctcgtaaccaggaaagaattgttgatgttgcaggtccaggtggatggaatgaccctgatatgcttgtcatagggaactttgggctatcatgggaccaacaagttacacaaatggctttgtgggcgatcatggccggccccctattcatgtctaatgatctacgtgcgatatcaccccaagcaaaggctttacttcaaaacaaggatgtcatagcgatcaaccaagatcctcttggtaaacaaggttatcaactgagaaaaggtgacaattttgaagtgtgggaaagaccattgtctggagacgcgtgggctgttgctattatcaaccgtcaagagatcggagggccaagatcttacactatcccggtagcctctttgggtaagggtgttgcgtgcaatcctgcctgcttcattacacaattgcttccagttaagagaaaattgggtttctatgaagcaacctctaggctaagaagtcacattaatcctactggtacggtattgttgcaattggagaacacaatgcaaacctctttgaaagatttgttataa

SEQ ID NO: 134 - protein, 398 aa, Artificial Sequence
  variant of human alpha-galactosidase A
LDNGLARTPPMGWLHWERFMCNLDCQEEPDSCISEKLFEEMAERMVTDGWKDAGYEYLCIDDCWMAPQRDSEGRLQADPQRFPHGIRQLANHVHSKGLKLGIYADVGNKTCAGFPGSFGYYDIDAQTFADWGVDLLKFDGCYCDSLENLADGYKHMSLALNRTGRPIVYSCEWPLYMWPFQKPNYTEIRQYCNHWRNFADIDDSWASIKSILDWTSRNQERIVDVAGPGGWNDPDMLVIGNFGLSWDQQVTQMALWAIMAGPLFMSNDLRAISPQAKALLQNKDVIAINQDPLGKQGYQLRKGDNFEVWERPLSGDAWAVAIINRQEIGGPRSYTIPVASLGKGVACNPACFITQLLPVKRKLGFYEATSRLRSHINPTGTVLLQLENTMQTSLKDLL

SEQ ID NO: 135 - DNA, 1197 bp, Artificial Sequence
  variant of human alpha-galactosidase A
ttggataacgggttagcccgtacacctccgatgggttggcttcactgggaaagattcatgtgtaacttagattgccaagaagagcctgacagctgtatctcagagaaactattcgaagagatggctgaacggatggtaactgaaggatggaaggatgctggttatgaatacctatgtattgatgattgctggatggctccacagcgtgattcagaaggtaggttacaagctgacccccagagattcccacatggcatacgtcagcttgcaaaccatgtacacagcaaaggtctaaagttaggcatctacgctgatgtcggaaacaagacatgtgctggtttcccaggttcattcggttactatgacatagatgcgcagacgtttgctgattggggtgttgatttgttgaagtttgatggatgctactgcgattccctggagaacctagccgatgggtacaaacacatgagtttggctctaaacaggactggtaggccgatcgtctatagttgtgaatggcccttgtacatgtggccgtttcagaagccaaactacactgagataagacaatactgtaaccattggcgtaactttgctgacatagatgattcatggtcgtcaatcaaatctatcttggattggacttctcgtaaccaggaaagaattgttgatgttgcaggtccaggtggatggaatgaccctgatatgcttgtcatagggaactttgggctatcatgggaccaacaagttacacaaatggctttgtgggcgatcatggccggccccctattcatgtctaatgatctacgtgcgatatcaccccaagcaaaggctttacttcaagataaggatgtcatagcgatcaaccaagatcctcttggtaaacaaggttatcaattgagaaaaggtgacaactttgaagtgtgggaaagaccattgtctggagacgcgtgggctgttgctattatcaaccgtcaagagatcggagggccaagatcttacactatcccggtagcctctttgggtaaaggtgttgcgtgcaatcctgcctgcttcattacacaattgcttccagttaagagaaaattgggtttctatgaagcaacctctaggctaagaagtcacattaatcctactggtacggtattgttgcaattggagaacacaatgcaaacctctttgaaagatttgttataa

SEQ ID NO: 136 - protein, 398 aa, Artificial Sequence
  variant of human alpha-galactosidase A
LDNGLARTPPMGWLHWERFMCNLDCQEEPDSCISEKLFEEMAERMVTEGWKDAGYEYLCIDDCWMAPQRDSEGRLQADPQRFPHGIRQLANHVHSKGLKLGIYADVGNKTCAGFPGSFGYYDIDAQTFADWGVDLLKFDGCYCDSLENLADGYKHMSLALNRTGRPIVYSCEWPLYMWPFQKPNYTEIRQYCNHWRNFADIDDSWSSIKSILDWTSRNQERIVDVAGPGGWNDPDMLVIGNFGLSWDQQVTQMALWAIMAGPLFMSNDLRAISPQAKALLQDKDVIAINQDPLGKQGYQLRKGDNFEVWERPLSGDAWAVAIINRQEIGGPRSYTIPVASLGKGVACNPACFITQLLPVKRKLGFYEATSRLRSHINPTGTVLLQLENTMQTSLKDLL

SEQ ID NO: 137 - DNA, 1197 bp, Artificial Sequence
  variant of human alpha-galactosidase A
ttggataacgggttagcccgtacacctccgatgggttggcttcactgggaaagattcatgtgtaacttagattgccaagaagagcctgacagctgtatctcagagaaactattcgaagagatggctgaacggatggtaactgaaggatggaaggatgctggttatgaatacctatgtattgatgattgctggatggctccacagcgtgattcagaaggtaggttacaagctgacccccagagattcccacatggcatacgtcagcttgcaaaccatgtacacagcaaaggtctaaagttaggcatctacgctgatgtcggaaacaagacatgtgctggtttcccaggttcattcggttactatgacatagatgcgcagacgtttgctgattggggtgttgatttgttgaagtttgatggatgctactgcgattccctggagaacctagccgatgggtacaaacacatgagtctggctctaaaccgtactggtaggccgatcgtctatagttgtgaatggcccttgtacatgtggccgtttcagaagccaaactacactgagataagacaatactgtaaccattggcgtaactttgctgacatagatgattcatgggcgtcaatcaaatctatcttggattggacttctcgtaaccaggaaagaattgttgatgttgcaggtccaggtggatggaatgaccctgatatgcttgtcatagggaactttgggctatcatgggaccaacaagttacacaaatggctttgtgggcgatcatggccggccccctattcatgtctaatgatctacgtgcgataagcccccaagcaaaggctttacttcaagataaggatgtcatagcgatcaaccaagatcctcttggtaaacaaggttatcaattgagaaaaggtgacaactttgaagtgtgggaaagaccattgtctggagacgcgtgggctgttgctattatcaaccgtcaagagatcggagggccaagatcttacactatcccggtagcctctttgggtgacggtgttgcgtgcaatcctgcctgcttcattacacaattgcttccagttaagagaaaattgggtttctatgaagcaacctctaggctaagaagtcacattaatcctactggtacggtattgttgcaattggagaacacaatgcaaacctctttgaaagatttgttataa

SEQ ID NO: 138 - protein, 398 aa, Artificial Sequence
  variant of human alpha-galactosidase A
LDNGLARTPPMGWLHWERFMCNLDCQEEPDSCISEKLFEEMAERMVTEGWKDAGYEYLCIDDCWMAPQRDSEGRLQADPQRFPHGIRQLANHVHSKGLKLGIYADVGNKTCAGFPGSFGYYDIDAQTFADWGVDLLKFDGCYCDSLENLADGYKHMSLALNRTGRPIVYSCEWPLYMWPFQKPNYTEIRQYCNHWRNFADIDDSWASIKSILDWTSRNQERIVDVAGPGGWNDPDMLVIGNFGLSWDQQVTQMALWAIMAGPLFMSNDLRAISPQAKALLQDKDVIAINQDPLGKQGYQLRKGDNFEVWERPLSGDAWAVAIINRQEIGGPRSYTIPVASLGDGVACNPACFITQLLPVKRKLGFYEATSRLRSHINPTGTVLLQLENTMQTSLKDLL

SEQ ID NO: 139 - DNA, 1197 bp, Artificial Sequence
  variant of human alpha-galactosidase A
ttggataacgggttagcccgtacacctccgatgggttggcttcactgggaaagattcatgtgtaacttagattgccaagaagagcctgacagctgtatctcagagaaactattcgaagagatggctgaacggatggtaaccgaaggatggaaggatgctggttatgaatacctatgtattgatgattgctggatggctccacagcgtgattcagaaggtaggttacaagctgacccccagagattcccacatggcatacgtcagcttgcaaaccatgtacacagcaaaggtctaaagttaggcatctacgctgatgtcggaaacaagacatgtgctggtttcccaggttcattcggttactatgacatagatgcgcagacgtttgctgattggggtgttgatttgttgaagtttgatggatgctactgcgattccctggagaacctagccgatgggtacaaacacatgagtttggctctaaacaggactggtaggccgatcgtctatagttgtgaatggcccttgtacatgtggccgtttcagaagccaaactacactgagataagacaatactgtaaccattggcgtaactttgctgacatagatgattcatgggcttcaatcaaatctatcttggattggacttctcgtaaccaggaaagaattgttgatgttgcaggtccaggtggatggaatgaccctgatatgcttgtcatagggaactttgggctatcatgggaccaacaagttacacaaatggctttgtgggcgatcatggccggccccctattcatgtctaatgatctacgtgcgatatcaccccaagcaaaggctttacttcaagataaggatgtcatagcgatcaaccaagatcctcttggtaaacaaggttatcaattgagaaaaggtgacaactttgaagtgtgggaaagaccattgtctggagacgcgtgggctgttgctattatcaaccgtcaagagatcggagggccaagatcttacactatcccggtagcctctttgggtggcggtgttgcgtgcaatcctgcctgcttcattacacaattgcttccagttaagagaaaattgggtttctatgaagcaacctctaggctaagaagtcacattaatcctactggtacggtattgttgcaattggagaacacaatgcaaacctctttgaaagatttgttataa

SEQ ID NO: 140 - protein, 398 aa, Artificial Sequence
  variant of human alpha-galactosidase A
LDNGLARTPPMGWLHWERFMCNLDCQEEPDSCISEKLFEEMAERMVTEGWKDAGYEYLCIDDCWMAPQRDSEGRLQADPQRFPHGIRQLANHVHSKGLKLGIYADVGNKTCAGFPGSFGYYDIDAQTFADWGVDLLKFDGCYCDSLENLADGYKHMSLALNRTGRPIVYSCEWPLYMWPFQKPNYTEIRQYCNHWRNFADIDDSWASIKSILDWTSRNQERIVDVAGPGGWNDPDMLVIGNFGLSWDQQVTQMALWAIMAGPLFMSNDLRAISPQAKALLQDKDVIAINQDPLGKQGYQLRKGDNFEVWERPLSGDAWAVAIINRQEIGGPRSYTIPVASLGGGVACNPACFITQLLPVKRKLGFYEATSRLRSHINPTGTVLLQLENTMQTSLKDLL

SEQ ID NO: 141 - DNA, 1197 bp, Artificial Sequence
  variant of human alpha-galactosidase A
ttggataacgggttagcccgtacacctccgatgggttggcttcactgggaaagattcatgtgtaacttagattgccaagaagagcctgacagctgtatctcagagaaactattcgaagagatggctgaacggatggtaactgaaggatggaaggatgctggttatgaatacctatgtattgatgattgctggatggctccacagcgtgattcagaaggtaggttacaagctgacccccagagattcccacatggcatacgccagcttgcaaatcatgtacacagtctgggtctaaagttaggcatctacgctgatgtcggaaacaagacatgtgctggtttcccaggttcattcggttactatgacatagatgcgcagacgtttgctgattggggtgttgatttgttgaagtttgatggatgctactgcgattccctggagaacctagccgatgggtacaaacacatgagtttggctctaaacaggactggtaggccgatcgtctatagttgtgaatggcccttgtacatgtggccgtttcagaagccaaactacactgagataagacaatactgtaaccattggcgtaactttgctgacatagatgattcatgggcttcaatcaaatctatcttggattggacttctcgtaaccaggaaagaattgttgatgttgcaggtccaggtggatggaatgaccctgatatgcttgtcatagggaactttgggctatcatgggaccaacaagttacacaaatggctttgtgggcgatcatggccggccccctattcatgtctaatgatctacgtgcgatatcaccccaagcaaaggctttacttcaagataaggatgtcatagcgatcaaccaagatcctcttggtaaacaaggttatcaattgagaaaaggtgacaactttgaagtgtgggaaagaccattgtctggagacgcgtgggctgttgctattatcaaccgtcaagagatcggagggccaagatcttacactatcccggtagcctctttgggtaagggtgttgcgtgcaatcctgcctgcttcattacacaattgcttccagttaagagaaaattgggtttctatgaagcaacctctaggctaagaagtcacattaatcctactggtacggtattgttgcaattggagaacacaatgcaaacctctttgaaagatttgttataa

SEQ ID NO: 142 - protein, 398 aa, Artificial Sequence
  variant of human alpha-galactosidase A
LDNGLARTPPMGWLHWERFMCNLDCQEEPDSCISEKLFEEMAERMVTEGWKDAGYEYLCIDDCWMAPQRDSEGRLQADPQRFPHGIRQLANHVHSLGLKLGIYADVGNKTCAGFPGSFGYYDIDAQTFADWGVDLLKFDGCYCDSLENLADGYKHMSLALNRTGRPIVYSCEWPLYMWPFQKPNYTEIRQYCNHWRNFADIDDSWASIKSILDWTSRNQERIVDVAGPGGWNDPDMLVIGNFGLSWDQQVTQMALWAIMAGPLFMSNDLRAISPQAKALLQDKDVIAINQDPLGKQGYQLRKGDNFEVWERPLSGDAWAVAIINRQEIGGPRSYTIPVASLGKGVACNPACFITQLLPVKRKLGFYEATSRLRSHINPTGTVLLQLENTMQTSLKDLL

SEQ ID NO: 143 - DNA, 1197 bp, Artificial Sequence
  variant of human alpha-galactosidase A
ttggataacgggttagcccgtacacctccgatgggttggcttcactgggaaagattcatgtgtaacttagattgccaagaagagcctgacagctgtatctcagagaaactattcgaagagatggctgaacggatggtaactgaaggatggaaggatgctggttatgaatacctatgtattgatgattgctggatggctccacagcgtgattcagaaggtaggttacaagctgacccccagagattcccacatggcatacgtcagcttgcaaaccatgtacacagtctgggtctaaagttaggcatctacgctgatgtcggaaacaagacatgtgctggtttcccaggttcattcggttactatgacatagatgcgcagacgtttgctgattggggtgttgatttgttgaagtttgatggatgctactgcgattccctggagaacctagccgatgggtacaaacacatgagtttggctctaaacaggactggtaggccgatcgtctatagttgtgaatggcccttgtacatgtggccgtttcagaagccaaactacactgagataagacaatactgtaaccattggcgtaactttgctgacatagatgattcatgggcttcaatcaaatctatcttggattggacttctcgtaaccaggaaagaattgttgatgttgcaggtccaggtggatggaatgaccctgatatgcttgtcatagggaactttgggctatcatgggaccaacaagttacacaaatggctttgtgggcgatcatggccggccccctattcatgtctaatgatctacgtgcgataagcccccaagcaaaggctttacttcaagataaggatgtcatagcgatcaaccaagatcctcttggtaaacaaggttatcaattgagaaaaggtgacaactttgaagtgtgggaaagacaattgtctggagacgcgtgggctgttgctattatcaaccgtcaagagatcggagggccaagatcttacactatcccggtagcctctttgggtggcggtgttgcgtgcaatcctgcctgcttcattacacaattgcttccagttaagagaaaattgggtttctatgaagcaacctctaggctaagaagtcacattaatcctactggtacggtattgttgcaattggagaacacaatgcaaacctctttgaaagatttgttataa

SEQ ID NO: 144 - protein, 398 aa, Artificial Sequence
  variant of human alpha-galactosidase A
LDNGLARTPPMGWLHWERFMCNLDCQEEPDSCISEKLFEEMAERMVTEGWKDAGYEYLCIDDCWMAPQRDSEGRLQADPQRFPHGIRQLANHVHSLGLKLGIYADVGNKTCAGFPGSFGYYDIDAQTFADWGVDLLKFDGCYCDSLENLADGYKHMSLALNRTGRPIVYSCEWPLYMWPFQKPNYTEIRQYCNHWRNFADIDDSWASIKSILDWTSRNQERIVDVAGPGGWNDPDMLVIGNFGLSWDQQVTQMALWAIMAGPLFMSNDLRAISPQAKALLQDKDVIAINQDPLGKQGYQLRKGDNFEVWERQLSGDAWAVAIINRQEIGGPRSYTIPVASLGGGVACNPACFITQLLPVKRKLGFYEATSRLRSHINPTGTVLLQLENTMQTSLKDLL

SEQ ID NO: 145 - DNA, 1197 bp, Artificial Sequence
  variant of human alpha-galactosidase A
ttggataacgggttagcccgtacacctccgatgggttggcttcactgggaaagattcatgtgtaacttagattgccaagaagagcctgacagctgtatctcagagaaactattcgaagagatggctgaacggatggtaactgaaggatggaaggatgctggttatgaatacctatgtattgatgattgctggatggctccacagcgtgattcagaaggtaggttacaagctgacccccagagattcccacatggcatacgtcagcttgcaaatcatgtacacagtctgggtctaaagttaggcatctacgctgatgtcggaaacaagacatgtgctggtttcccaggttcattcggttactatgacatagatgcgcagacgtttgctgattggggtgttgatttgttgaagtttgatggatgctactgcgattccctggagaacctagccgatgggtacaaacacatgagtttggctctaaacaggactggtaggccgatcgtctatagttgtgaatggcccttgtacatgtggccgtttcagaagccaaactacactgagataagacaatactgtaaccattggcgtaactttgctgacatagatgattcatgggcgtcaatcaaatctatcttggattggacttctcgtaaccaggaaagaattgttgatgttgcaggtccaggtggatggaatgaccctgatatgcttgtcatagggaactttgggctatcatgggaccaacaagttacacaaatggctttgtgggcgatcatggccggccccctattcatgtctaatgatctacgtgcgataccgccccaagcaaaggctttacttcaagataaggatgtcatagcgatcaaccaagatcctcttggtaaacaaggttatcaattgagaaaaggtgacaactttgaagtgtgggaaagaccattgtctggagacgcgtgggctgttgctattatcaaccgtcaagagatcggagggccaagatcttacactatcccggtagcctctttgggtaaaggtgttgcgtgcaatcctgcctgcttcattacacaattgcttccagttaagagaaaattgggtttctatgaagcaacctctaggctaagaagtcacattaatcctactggtacggtattgttgcaattggagaacacaatgcaaacctctttgaaagatttgttataa

SEQ ID NO: 146 - protein, 398 aa, Artificial Sequence
  variant of human alpha-galactosidase A
LDNGLARTPPMGWLHWERFMCNLDCQEEPDSCISEKLFEEMAERMVTEGWKDAGYEYLCIDDCWMAPQRDSEGRLQADPQRFPHGIRQLANHVHSLGLKLGIYADVGNKTCAGFPGSFGYYDIDAQTFADWGVDLLKFDGCYCDSLENLADGYKHMSLALNRTGRPIVYSCEWPLYMWPFQKPNYTEIRQYCNHWRNFADIDDSWASIKSILDWTSRNQERIVDVAGPGGWNDPDMLVIGNFGLSWDQQVTQMALWAIMAGPLFMSNDLRAIPPQAKALLQDKDVIAINQDPLGKQGYQLRKGDNFEVWERPLSGDAWAVAIINRQEIGGPRSYTIPVASLGKGVACNPACFITQLLPVKRKLGFYEATSRLRSHINPTGTVLLQLENTMQTSLKDLL

SEQ ID NO: 147 - DNA, 1197 bp, Artificial Sequence
  variant of human alpha-galactosidase A
ttggataacgggttagcccgtacacctccgatgggttggcttcactgggaaagattcatgtgtaacttagattgccaagaagagcctgacagctgtatctcagagaaactattcgaagagatggctgaacggatggtaactgaaggatggaaggatgctggttatgaatacctatgtattgatgattgctggatggctccacagcgtgattcagaaggtaggttacaagctgacccccagagattcccacatggcatacgtcagcttgcaaaccatgtacacagcaaaggtctaaagttaggcatctacgctgatgtcggaaacaagacatgtgctggtttcccaggttcattcggttactatgacatagatgcgcagacgtttgctgattggggtgttgatttgttgaagtttgatggatgctactgcgattccctggagaacctagccgatgggtacaaacacatgagtgcagctctaaacaaaactggtaggccgatcgtctatagttgtgaatggcccttgtacatgtggccgtttcagaagccaaactacactgagataagacaatactgtaaccattggcgtaactttgctgacatagatgattcatgggcgtcaatcaaatctatcttggattggacttctcgtaaccaggaaagaattgttgatgttgcaggtccaggtggatggaatgaccctgatatgcttgtcatagggaactttgggctatcatgggaccaacaagttacacaaatggctttgtgggcgatcatggccggccccctattcatgtctaatgatctacgtgcgataggcccccaagcaaaggctttacttcaagataaggatgtcatagcgatcaaccaagatcctcttggtaaacaaggttatcaattgagaaaaggtgacaactttgaagtgtgggaaagaccattgtctggagacgcgtgggctgttgctattatcaaccgtcaagagatcggagggccaagatcttacactatcccggtagcctctttgggtaaaggtgttgcgtgcaatcctgcctgcttcattacacaattgcttccagttaagagaaaattgggtttctatgaagcaacctctaggctaagaagtcacattaatcctactggtacggtattgttgcaattggagaacacaatgcaaacctctttgaaagatttgttataa

SEQ ID NO: 148 - protein, 398 aa, Artificial Sequence
  variant of human alpha-galactosidase A
LDNGLARTPPMGWLHWERFMCNLDCQEEPDSCISEKLFEEMAERMVTEGWKDAGYEYLCIDDCWMAPQRDSEGRLQADPQRFPHGIRQLANHVHSKGLKLGIYADVGNKTCAGFPGSFGYYDIDAQTFADWGVDLLKFDGCYCDSLENLADGYKHMSAALNKTGRPIVYSCEWPLYMWPFQKPNYTEIRQYCNHWRNFADIDDSWASIKSILDWTSRNQERIVDVAGPGGWNDPDMLVIGNFGLSWDQQVTQMALWAIMAGPLFMSNDLRAIGPQAKALLQDKDVIAINQDPLGKQGYQLRKGDNFEVWERPLSGDAWAVAIINRQEIGGPRSYTIPVASLGKGVACNPACFITQLLPVKRKLGFYEATSRLRSHINPTGTVLLQLENTMQTSLKDLL

SEQ ID NO: 149 - DNA, 1197 bp, Artificial Sequence
  variant of human alpha-galactosidase A
ttggataacgggttagcccgtacacctccgatgggttggcttcactgggaaagattcatgtgtaacttagattgccaagaagagcctgacagctgtatctcagagaaactattcgaagagatggctgaacggatggtaactgaaggatggaaggatgctggttatgaatacctatgtattgatgattgctggatggctccacagcgtgattcagaaggtaggttacaagctgacccccagagattcccacatggcatacgtcagcttgcaaaccatgtacacagcaaaggtctaaagttaggcatctacgctgatgtcggaaacaagacatgtgctggtttcccaggttcattcggttactatgacatagatgcgcagacgtttgctgattggggtgttgatttgttgaagtttgatggatgctactgcgattccctggagaacctagccgatgggtacaaacacatgagtcgtgctctaaaccgtactggtaggccgatcgtctatagttgtgaatggcccttgtacatgtggccgtttcagaagccaaactacactgagataagacaatactgtaaccattggcgtaactttgctgacatagatgattcatgggcgtcaatcaaatctatcttggattggacttctcgtaaccaggaaagaattgttgatgttgcaggtccaggtggatggaatgaccctgatatgcttgtcatagggaactttgggctatcatgggaccaacaagttacacaaatggctttgtgggcgatcatggccggccccctattcatgtctaatgatctacgtgcgatatcaccccaagcaaaggctttacttcaagataaggatgtcatagcgatcaaccaagatcctcttggtaaacaaggttatcaattgagaaaaggtgacaactttgaagtgtgggaaagaccattgtctggagacgcgtgggctgttgctattatcaaccgtcaagagatcggagggccaagatcttacactatcccggtagcctctttgggtaagggtgttgcgtgcaatcctgcctgcttcattacacaattgcttccagttaagagaaaattgggtttctatgaagcaacctctaggctaagaagtcacattaatcctactggtacggtattgttgcaattggagaacacaatgcaaacctctttgaaagatttgttataa

SEQ ID NO: 150 - protein, 398 aa, Artificial Sequence
  variant of human alpha-galactosidase A
LDNGLARTPPMGWLHWERFMCNLDCQEEPDSCISEKLFEEMAERMVTEGWKDAGYEYLCIDDCWMAPQRDSEGRLQADPQRFPHGIRQLANHVHSKGLKLGIYADVGNKTCAGFPGSFGYYDIDAQTFADWGVDLLKFDGCYCDSLENLADGYKHMSRALNRTGRPIVYSCEWPLYMWPFQKPNYTEIRQYCNHWRNFADIDDSWASIKSILDWTSRNQERIVDVAGPGGWNDPDMLVIGNFGLSWDQQVTQMALWAIMAGPLFMSNDLRAISPQAKALLQDKDVIAINQDPLGKQGYQLRKGDNFEVWERPLSGDAWAVAIINRQEIGGPRSYTIPVASLGKGVACNPACFITQLLPVKRKLGFYEATSRLRSHINPTGTVLLQLENTMQTSLKDLL

SEQ ID NO: 151 - DNA, 1197 bp, Artificial Sequence
  variant of human alpha-galactosidase A
ttggataacgggttagcccgtacacctccgatgggttggcttcactgggaaagattcatgtgtaacttagattgccaagaagagcctgacagctgtatctcagagaaactattcgaagagatggctgaacggatggtaaccgaaggatggaaggatgctggttatgaatacctatgtattgatgattgctggatggctccacagcgtgattcagaaggtaggttacaagctgacccccagagattcccacatggcatacgccagcttgcacagcatgtacacgagaagggtctaaagttaggcatctacgctgatgtcggaaacaagacatgtgctggtttcccaggttcattcggttactatgacatagatgcgcagacgtttgctgattggggtgttgatttgttgaagtttgatggatgctactgcgattccctggagaacctagccgatgggtacaaacacatgagtttggctctaaacaggactggtaggccgatcgtctatagttgtgaatggcccttgtacatgtggccgtttcagaagccaaactacactgagataagacaatactgtaaccattggcgtaactttgctgacatagatgattcatgggcgtcaatcaaatctatcttggattggacttctcgtaaccaggaaagaattgttgatgttgcaggtccaggtggatggaatgaccctgatatgcttgtcatagggaactttgggctatcatgggaccaacaagttacacaaatggctttgtgggcgatcatggccggccccctattcatgtctaatgatctacgtgcgataagcccccaagcaaaggctttacttcaagataaggatgtcatagcgatcaaccaagatcctcttggtaaacaaggttatcaattgagaaaaggtgacaactttgaagtgtgggaaagaccattgtctggagacgcgtgggctgttgctattatcaaccgtcaagagatcggagggccaagatcttacactatcccggtagcctctttgggtaaaggtgttgcgtgcaatcctgcctgcttcattacacaattgcttccagttaagagaaaattgggtttctatgaagcaacctctaggctaagaagtcacattaatcctactggtacggtattgttgcaattggagaacacaatgcaaacctctttgaaagatttgttataa

SEQ ID NO: 152 - protein, 398 aa, Artificial Sequence
  variant of human alpha-galactosidase A
LDNGLARTPPMGWLHWERFMCNLDCQEEPDSCISEKLFEEMAERMVTEGWKDAGYEYLCIDDCWMAPQRDSEGRLQADPQRFPHGIRQLAQHVHEKGLKLGIYADVGNKTCAGFPGSFGYYDIDAQTFADWGVDLLKFDGCYCDSLENLADGYKHMSLALNRTGRPIVYSCEWPLYMWPFQKPNYTEIRQYCNHWRNFADIDDSWASIKSILDWTSRNQERIVDVAGPGGWNDPDMLVIGNFGLSWDQQVTQMALWAIMAGPLFMSNDLRAISPQAKALLQDKDVIAINQDPLGKQGYQLRKGDNFEVWERPLSGDAWAVAIINRQEIGGPRSYTIPVASLGKGVACNPACFITQLLPVKRKLGFYEATSRLRSHINPTGTVLLQLENTMQTSLKDLL

SEQ ID NO: 153 - DNA, 1197 bp, Artificial Sequence
  variant of human alpha-galactosidase A
ttggataacgggttagcccgtacacctccgatgggttggcttcactgggaaagattcatgtgtaacttagattgccaagaagagcctgacagctgtatctcagagaaactattcgaagagatggctgaacggatggtaaccgaaggatggaaggatgctggttatgaatacctatgtattgatgattgctggatggctccacagcgtgattcagaaggtaggttacaagctgacccccagagattcccacatggcatacgccagcttgcacagcatgtacacgagctgggtctaaagttaggcatctacgctgatgtcggaaacaagacatgtgctggtttcccaggttcattcggttactatgacatagatgcgcagacgtttgctgattggggtgttgatttgttgaagtttgatggatgctactgcgattccctggagaacctagccgatgggtacaaacacatgagtttggctctaaacaggactggtaggccgatcgtctatagttgtgaatggcccttgtacatgtggccgtttcagaagccaaactacactgagataagacaatactgtaaccattggcgtaactttgctgacatagatgattcatgggcgtcaatcaaatctatcttggattggacttctcgtaaccaggaaagaattgttgatgttgcaggtccaggtggatggaatgaccctgatatgcttgtcatagggaactttgggctatcatgggaccaacaagttacacaaatggctttgtgggcgatcatggccggccccctattcatgtctaatgatctacgtgcgatatcaccccaagcaaaggctttacttcaagataaggatgtcatagcgatcaaccaagatcctcttggtaaacaaggttatcaattgagaaaaggtgacaactttgaagtgtgggaaagaccattgtctggagacgcgtgggctgttgctattatcaaccgtcaagagatcggagggccaagatcttacactatcccggtagcctctttgggtaaaggtgttgcgtgcaatcctgcctgcttcattacacaattgcttccagttaagagaaaattgggtttctatgaagcaacctctaggctaagaagtcacattaatcctactggtacggtattgttgcaattggagaacacaatgcaaacctctttgaaagatttgttataa

SEQ ID NO: 154 - protein, 398 aa, Artificial Sequence
  variant of human alpha-galactosidase A
LDNGLARTPPMGWLHWERFMCNLDCQEEPDSCISEKLFEEMAERMVTEGWKDAGYEYLCIDDCWMAPQRDSEGRLQADPQRFPHGIRQLAQHVHELGLKLGIYADVGNKTCAGFPGSFGYYDIDAQTFADWGVDLLKFDGCYCDSLENLADGYKHMSLALNRTGRPIVYSCEWPLYMWPFQKPNYTEIRQYCNHWRNFADIDDSWASIKSILDWTSRNQERIVDVAGPGGWNDPDMLVIGNFGLSWDQQVTQMALWAIMAGPLFMSNDLRAISPQAKALLQDKDVIAINQDPLGKQGYQLRKGDNFEVWERPLSGDAWAVAIINRQEIGGPRSYTIPVASLGKGVACNPACFITQLLPVKRKLGFYEATSRLRSHINPTGTVLLQLENTMQTSLKDLL

SEQ ID NO: 155 - DNA, 1197 bp, Artificial Sequence
  variant of human alpha-galactosidase A
ttggataacgggttagcccgtacacctccgatgggttggcttcactgggaaagattcatgtgtaacttagattgccaagaagagcctgacagctgtatctcagagaaactattcgaagagatggctgaacggatggtaaccgaaggatggaaggatgctggttatgaatacctatgtattgatgattgctggatggctccacagcgtgattcagaaggtaggttacaagctgacccccagagattcccacatggcatacgtcagcttgcaaaccatgtacacagcaaaggtctaaagttaggcatctacgctgatgtcggaaacaagacatgtgctggtttcccaggttcattcggttactatgacatagatgcgcagacgtttgctgattggggtgttgatttgttgaagtttgatggatgctactgcgattccctggagaacctagccgatgggtacaaacacatgagtctggctctaaaccatactggtaggccgatcgtctatagttgtgaatggcccttgtacatgtggccgtttcagaagccaaactacactgagataagacaatactgtaaccattggcgtaactttgctgacatagatgattcatgggcttcaatcaaatctatcttggattggacttctcgtaaccaggaaagaattgttgatgttgcaggtccaggtggatggaatgaccctgatatgcttgtcatagggaactttgggctatcatgggaccaacaagttacacaaatggctttgtgggcgatcatggccggccccctattcatgtctaatgatctacgtgcgatatcaccccaagcaaaggctttacttcaagataaggatgtcatagcgatcaaccaagatcctcttggtaaacaaggttatcaattgagaaaaggtgacaactttgaagtgtgggaaagaccattgtctggagacgcgtgggctgttgctattatcaaccgtcaagagatcggagggccaagatcttacactatcccggtagcctctttgggtgacggtgttgcgtgcaatcctgcctgcttcattacacaattgcttccagttaagagaaaattgggtttctatgaagcaacctctaggctaagaagtcacattaatcctactggtacggtattgttgcaattggagaacacaatgcaaacctctttgaaagatttgttataa

SEQ ID NO: 156 - protein, 398 aa, Artificial Sequence
  variant of human alpha-galactosidase A
LDNGLARTPPMGWLHWERFMCNLDCQEEPDSCISEKLFEEMAERMVTEGWKDAGYEYLCIDDCWMAPQRDSEGRLQADPQRFPHGIRQLANHVHSKGLKLGIYADVGNKTCAGFPGSFGYYDIDAQTFADWGVDLLKFDGCYCDSLENLADGYKHMSLALNHTGRPIVYSCEWPLYMWPFQKPNYTEIRQYCNHWRNFADIDDSWASIKSILDWTSRNQERIVDVAGPGGWNDPDMLVIGNFGLSWDQQVTQMALWAIMAGPLFMSNDLRAISPQAKALLQDKDVIAINQDPLGKQGYQLRKGDNFEVWERPLSGDAWAVAIINRQEIGGPRSYTIPVASLGDGVACNPACFITQLLPVKRKLGFYEATSRLRSHINPTGTVLLQLENTMQTSLKDLL

SEQ ID NO: 157 - DNA, 1197 bp, Artificial Sequence
  variant of human alpha-galactosidase A
ttggataacgggttagcccgtacacctccgatgggttggcttcactgggaaagattcatgtgtaacttagattgccaagaagagcctgacagctgtatctcagagaaactattcgaagagatggctgaacggatggtaactgaaggatggaaggatgctggttatgaatacctatgtattgatgattgctggatggctccacagcgtgattcagaaggtaggttacaagctgacccccagagattcccacatggcatacgtcagcttgcaaaccatgtacacagcaaaggtctaaagttaggcatctacgctgatgtcggaaacaagacatgtgctggtttcccaggttcattcggttactatgacatagatgcgcagacgtttgctgattggggtgttgatttgttgaagtttgatggatgctactgcgattccctggagaacctagccgatgggtacaaacacatgagtctggctctaaacaaaactggtaggccgatcgtctatagttgtgaatggcccttgtacatgtggccgtttcagaagccaaactacactgagataagacaatactgtaaccattggcgtaactttgctgacatagatgattcatgggcttcaatcaaatctatcttggattggacttctcgtaaccaggaaagaattgttgatgttgcaggtccaggtggatggaatgaccctgatatgcttgtcatagggaactttgggctatcatgggaccaacaagttacacaaatggctttgtgggcgatcatggccggccccctattcatgtctaatgatctacgtgcgataagcccccaagcaaaggctttacttcaagataaggatgtcatagcgatcaaccaagatcctcttggtaaacaaggttatcaattgagaaaaggtgacaactttgaagtgtgggaaagaccattgtctggagacgcgtgggctgttgctattatcaaccgtcaagagatcggagggccaagatcttacactatcccggtagcctctttgggtaagggtgttgcgtgcaatcctgcctgcttcattacacaattgcttccagttaagagaaaattgggtttctatgaagcaacctctaggctaagaagtcacattaatcctactggtacggtattgttgcaattggagaacacaatgcaaacctctttgaaagatttgttataa

SEQ ID NO: 158 - protein, 398 aa, Artificial Sequence
  variant of human alpha-galactosidase A
LDNGLARTPPMGWLHWERFMCNLDCQEEPDSCISEKLFEEMAERMVTEGWKDAGYEYLCIDDCWMAPQRDSEGRLQADPQRFPHGIRQLANHVHSKGLKLGIYADVGNKTCAGFPGSFGYYDIDAQTFADWGVDLLKFDGCYCDSLENLADGYKHMSLALNKTGRPIVYSCEWPLYMWPFQKPNYTEIRQYCNHWRNFADIDDSWASIKSILDWTSRNQERIVDVAGPGGWNDPDMLVIGNFGLSWDQQVTQMALWAIMAGPLFMSNDLRAISPQAKALLQDKDVIAINQDPLGKQGYQLRKGDNFEVWERPLSGDAWAVAIINRQEIGGPRSYTIPVASLGKGVACNPACFITQLLPVKRKLGFYEATSRLRSHINPTGTVLLQLENTMQTSLKDLL

SEQ ID NO: 159 - DNA, 1197 bp, Artificial Sequence
  variant of human alpha-galactosidase A
ttggataacgggttagcccgtacacctccgatgggttggcttcactgggaaagattcatgtgtaacttagattgccaagaagagcctgacagctgtatctcagagaaactattcgaagagatggctgaacggatggtaactgaaggatggaaggatgctggttatgaatacctatgtattgatgattgctggatggctccacagcgtgattcagaaggtaggttacaagctgacccccagagattcccacatggcatacgtcagcttgcaaaccatgtacacagcaaaggtctaaagttaggcatctacgctgatgtcggaaacaagacatgtgctggtttcccaggttcattcggttactatgacatagatgcgcagacgtttgctgattggggtgttgatttgttgaagtttgatggatgctactgcgattccctggagaacctagccgatgggtacaaacacatgagtttggctctaaacaaaactggtaggccgatcgtctatagttgtgaatggcccttgtacatgtggccgtttcagaagccaaactacactgagataagacaatactgtaaccattggcgtaactttgctgacatagatgattcatgggcttcaatcaaatctatcttggattggacttctcgtaaccaggaaagaattgttgatgttgcaggtccaggtggatggaatgaccctgatatgcttgtcatagggaactttgggctatcatgggaccaacaagttacacaaatggctttgtgggcgatcatggccggccccctattcatgtctaatgatctacgtgcgataccgccccaagcaaaggctttacttcaagataaggatgtcatagcgatcaaccaagatcctcttggtaaacaaggttatcaattgagaaaaggtgacaactttgaagtgtgggaaagaccattgtctggagacgcgtgggctgttgctattatcaaccgtcaagagatcggagggccaagatcttacactatcccggtagcctctttgggtaaaggtgttgcgtgcaatcctgcctgcttcattacacaattgcttccagttaagagaaaattgggtttctatgaagcaacctctaggctaagaagtcacattaatcctactggtacggtattgttgcaattggagaacacaatgcaaacctctttgaaagatttgttataa

SEQ ID NO: 160 - protein, 398 aa, Artificial Sequence
  variant of human alpha-galactosidase A
LDNGLARTPPMGWLHWERFMCNLDCQEEPDSCISEKLFEEMAERMVTEGWKDAGYEYLCIDDCWMAPQRDSEGRLQADPQRFPHGIRQLANHVHSKGLKLGIYADVGNKTCAGFPGSFGYYDIDAQTFADWGVDLLKFDGCYCDSLENLADGYKHMSLALNKTGRPIVYSCEWPLYMWPFQKPNYTEIRQYCNHWRNFADIDDSWASIKSILDWTSRNQERIVDVAGPGGWNDPDMLVIGNFGLSWDQQVTQMALWAIMAGPLFMSNDLRAIPPQAKALLQDKDVIAINQDPLGKQGYQLRKGDNFEVWERPLSGDAWAVAIINRQEIGGPRSYTIPVASLGKGVACNPACFITQLLPVKRKLGFYEATSRLRSHINPTGTVLLQLENTMQTSLKDLL

SEQ ID NO: 161 - DNA, 1197 bp, Artificial Sequence
  variant of human alpha-galactosidase A
ttggataacgggttagcccgtacacctccgatgggttggcttcactgggaaagattcatgtgtaacttagattgccaagaagagcctgacagctgtatctcagagaaactattcgaagagatggctgaacggatggtaaccgaaggatggaaggatgctggttatgaatacctatgtattgatgattgctggatggctccacagcgtgattcagaaggtaggttacaagctgacccccagagattcccacatggcatacgtcagcttgcaaaccatgtacacagcaaaggtctaaagttaggcatctacgctgatgtcggaaacaagacatgtgctggtttcccaggttcattcggttactatgacatagatgcgcagacgtttgctgattggggtgttgatttgttgaagtttgatggatgctactgcgattccctggagaacctagccgatgggtacaaacacatgagtttggctctaaacagtactggtaggccgatcgtctatagttgtgaatggcccttgtacatgtggccgtttcagaagccaaactacactgagataagacaatactgtaaccattggcgtaactttgctgacatagatgattcatgggcttcaatcaaatctatcttggattggacttctcgtaaccaggaaagaattgttgatgttgcaggtccaggtggatggaatgaccctgatatgcttgtcatagggaactttgggctatcatgggaccaacaagttacacaaatggctttgtgggcgatcatggccggccccctattcatgtctaatgatctacgtgcgatatcaccccaagcaaaggctttacttcaagataaggatgtcatagcgatcaaccaagatcctcttggtaaacaaggttatcaattgagaaaaggtgacaactttgaagtgtgggaaagaccattgtctggagacgcgtgggctgttgctattatcaaccgtcaagagatcggagggccaagatcttacactatcccggtagcctctttgggtaagggtgttgcgtgcaatcctgcctgcttcattacacaattgcttccagttaagagaaaattgggtttctatgaagcaacctctaggctaagaagtcacattaatcctactggtacggtattgttgcaattggagaacacaatgcaaacctctttgaaagatttgttataa

SEQ ID NO: 162 - protein, 398 aa, Artificial Sequence
  variant of human alpha-galactosidase A
LDNGLARTPPMGWLHWERFMCNLDCQEEPDSCISEKLFEEMAERMVTEGWKDAGYEYLCIDDCWMAPQRDSEGRLQADPQRFPHGIRQLANHVHSKGLKLGIYADVGNKTCAGFPGSFGYYDIDAQTFADWGVDLLKFDGCYCDSLENLADGYKHMSLALNSTGRPIVYSCEWPLYMWPFQKPNYTEIRQYCNHWRNFADIDDSWASIKSILDWTSRNQERIVDVAGPGGWNDPDMLVIGNFGLSWDQQVTQMALWAIMAGPLFMSNDLRAISPQAKALLQDKDVIAINQDPLGKQGYQLRKGDNFEVWERPLSGDAWAVAIINRQEIGGPRSYTIPVASLGKGVACNPACFITQLLPVKRKLGFYEATSRLRSHINPTGTVLLQLENTMQTSLKDLL

SEQ ID NO: 163 - DNA, 1197 bp, Artificial Sequence
  variant of human alpha-galactosidase A
ttggataacgggttagcccgtacacctccgatgggttggcttcactgggaaagattcatgtgtaacttagattgccaagaagagcctgacagctgtatctcagagaaactattcgaagagatggctgaacggatggtaactgaaggatggaaggatgctggttatgaatacctatgtattgatgattgctggatggctccacagcgtgattcagaaggtaggttacaagctgacccccagagattcccacatggcataaagcagcttgcaaatcatgtacacagtattggtctaaagttaggcatctacgctgatgtcggaaacaagacatgtgctggtttcccaggttcattcggttactatgacatagatgcgcagacgtttgctgattggggtgttgatttgttgaagtttgatggatgctactgcgattccctggagaacctagccgatgggtacaaaaacatgagtttggctctaaacaggactggtaggccgatcgtctatagttgtgaatggcccttgtacatgtggccgtttcagaagccaaactacactgagataagacaatactgtaaccattggcgtaactttgctgacatagatgattcatgggcgtcaatcaaatctatcttggattggacttctcgtaaccaggaaagaattgttgatgttgcaggtccaggtggatggaatgaccctgatatgcttgtcatagggaactttgggctatcatgggaccaacaagttacacaaatggctttgtgggcgatcatggccggccccctattcatgtctaatgatctacgtgcgataccgccccaagcaaaggctttacttcaagataaggatgtcatagcgatcaaccaagatcctcttggtaaacaaggttatcaattgagaaaaggtgacaactttgaagtgtgggaaagaccattgtctggagacgcgtgggctgttgctattatcaaccgtcaagagatcggagggccaagatcttacactatcccggtagcctctttgggtggcggtgttgcgtgcaatcctgcctgcttcattacacaattgcttccagttaagagaaaattgggtttctatgaagcaacctctaggctaagaagtcacattaatcctactggtacggtattgttgcaattggagaacacaatgcaaacctctttgaaagatttgttataa

SEQ ID NO: 164 - protein, 398 aa, Artificial Sequence
  variant of human alpha-galactosidase A
LDNGLARTPPMGWLHWERFMCNLDCQEEPDSCISEKLFEEMAERMVTEGWKDAGYEYLCIDDCWMAPQRDSEGRLQADPQRFPHGIKQLANHVHSIGLKLGIYADVGNKTCAGFPGSFGYYDIDAQTFADWGVDLLKFDGCYCDSLENLADGYKNMSLALNRTGRPIVYSCEWPLYMWPFQKPNYTEIRQYCNHWRNFADIDDSWASIKSILDWTSRNQERIVDVAGPGGWNDPDMLVIGNFGLSWDQQVTQMALWAIMAGPLFMSNDLRAIPPQAKALLQDKDVIAINQDPLGKQGYQLRKGDNFEVWERPLSGDAWAVAIINRQEIGGPRSYTIPVASLGGGVACNPACFITQLLPVKRKLGFYEATSRLRSHINPTGTVLLQLENTMQTSLKDLL

SEQ ID NO: 165 - DNA, 1197 bp, Artificial Sequence
  variant of human alpha-galactosidase A
ttggataacgggttagcccgtacacctccgatgggttggcttcactgggaaagattcatgtgtaacttagattgccaagaagagcctgacagctgtatctcagagaaactattcgaagagatggctgaacggatggtaactgaaggatggaaggatgctggttatgaatacctatgtattgatgattgctggatggctccacagcgtgattcagaaggtaggttacaagctgacccccagagattcccacatggcataaagcagcttgcacagcatgtacacgagctgggtctaaagttaggcatctacgctgatgtcggaaacaagacatgtgctggtttcccaggttcattcggttactatgacatagatgcgcagacgtttgctgattggggtgttgatttgttgaagtttgatggatgctactgcgattccctggagaacctagccgatgggtacaaacacatgagtttggctctaaacaggactggtaggccgatcgtctatagttgtgaatggcccttgtacatgtggccgtttcagaagccaaactacactgagataagacaatactgtaaccattggcgtaactttgctgacatagatgattcatggtcgtcaatcaaatctatcttggattggacttctcgtaaccaggaaagaattgttgatgttgcaggtccaggtggatggaatgaccctgatatgcttgtcatagggaactttgggctatcatgggaccaacaagttacacaaatggctttgtgggcgatcatggccggccccctattcatgtctaatgatctacgtgcgatatcaccccaagcaaaggctttacttcaagataaggatgtcatagcgatcaaccaagatcctcttggtaaacaaggttatcaattgagaaaaggtgacaactttgaagtgtgggaaagaccattgtctggagacgcgtgggctgttgctattatcaaccgtcaagagatcggagggccaagatcttacactatcccggtagcctctttgggtggcggtgttgcgtgcaatcctgcctgcttcattacacaattgcttccagttaagagaaaattgggtttctatgaagcaacctctaggctaagaagtcacattaatcctactggtacggtattgttgcaattggagaacacaatgcaaacctctttgaaagatttgttataa

SEQ ID NO: 166 - protein, 398 aa, Artificial Sequence
  variant of human alpha-galactosidase A
LDNGLARTPPMGWLHWERFMCNLDCQEEPDSCISEKLFEEMAERMVTEGWKDAGYEYLCIDDCWMAPQRDSEGRLQADPQRFPHGIKQLAQHVHELGLKLGIYADVGNKTCAGFPGSFGYYDIDAQTFADWGVDLLKFDGCYCDSLENLADGYKHMSLALNRTGRPIVYSCEWPLYMWPFQKPNYTEIRQYCNHWRNFADIDDSWSSIKSILDWTSRNQERIVDVAGPGGWNDPDMLVIGNFGLSWDQQVTQMALWAIMAGPLFMSNDLRAISPQAKALLQDKDVIAINQDPLGKQGYQLRKGDNFEVWERPLSGDAWAVAIINRQEIGGPRSYTIPVASLGGGVACNPACFITQLLPVKRKLGFYEATSRLRSHINPTGTVLLQLENTMQTSLKDLL

SEQ ID NO: 167 - DNA, 1197 bp, Artificial Sequence
  variant of human alpha-galactosidase A
ttggataacgggttagcccgtacacctccgatgggttggcttcactgggaaagattcatgtgtaacttagattgccaagaagagcctgacagctgtatctcagagaaactattcgaagagatggctgaacggatggtaactgaaggatggaaggatgctggttatgaatacctatgtattgatgattgctggatggctccacagcgtgattcagaaggtaggttacaagctgacccccagagattcccacatggcataaagcagcttgcacagcatgtacacgagctgggtctaaagttaggcatctacgctgatgtcggaaacaagacatgtgctggtttcccaggttcattcggttactatgacatagatgcgcagacgtttgctgattggggtgttgatttgttgaagtttgatggatgctactgcgattccctggagaacctagccgatgggtacaaacacatgagtgcagctctaaacaaaactggtaggccgatcgtctatagttgtgaatggcccttgtacatgtggccgtttcagaagccaaactacactgagataagacaatactgtaaccattggcgtaactttgctgacatagatgattcatgggcttcaatcaaatctatcttggattggacttctcgtaaccaggaaagaattgttgatgttgcaggtccaggtggatggaatgaccctgatatgcttgtcatagggaactttgggctatcatgggaccaacaagttacacaaatggctttgtgggcgatcatggccggccccctattcatgtctaatgatctacgtgcgatatcaccccaagcaaaggctttacttcaagataaggatgtcatagcgatcaaccaagatcctcttggtaaacaaggttatcaattgagaaaaggtgacaactttgaagtgtgggaaagaccattgtctggagacgcgtgggctgttgctattatcaaccgtcaagagatcggagggccaagatcttacactatcccggtagcctctttgggtaagggtgttgcgtgcaatcctgcctgcttcattacacaattgcttccagttaagagaaaattgggtttctatgaagcaacctctaggctaagaagtcacattaatcctactggtacggtattgttgcaattggagaacacaatgcaaacctctttgaaagatttgttataa

SEQ ID NO: 168 - protein, 398 aa, Artificial Sequence
  variant of human alpha-galactosidase A
LDNGLARTPPMGWLHWERFMCNLDCQEEPDSCISEKLFEEMAERMVTEGWKDAGYEYLCIDDCWMAPQRDSEGRLQADPQRFPHGIKQLAQHVHELGLKLGIYADVGNKTCAGFPGSFGYYDIDAQTFADWGVDLLKFDGCYCDSLENLADGYKHMSAALNKTGRPIVYSCEWPLYMWPFQKPNYTEIRQYCNHWRNFADIDDSWASIKSILDWTSRNQERIVDVAGPGGWNDPDMLVIGNFGLSWDQQVTQMALWAIMAGPLFMSNDLRAISPQAKALLQDKDVIAINQDPLGKQGYQLRKGDNFEVWERPLSGDAWAVAIINRQEIGGPRSYTIPVASLGKGVACNPACFITQLLPVKRKLGFYEATSRLRSHINPTGTVLLQLENTMQTSLKDLL

SEQ ID NO: 169 - DNA, 1197 bp, Artificial Sequence
  variant of human alpha-galactosidase A
ttggataacgggttagcccgtacacctccgatgggttggcttcactgggaaagattcatgtgtaacttagattgccaagaagagcctgacagctgtatctcagagaaactattcgaagagatggctgaacggatggtaactgaaggatggaaggatgctggttatgaatacctatgtattgatgattgctggatggctccacagcgtgattcagaaggtaggttacaagctgacccccagagattcccacatggcatacgtcagcttgcaaaccatgtacacagcaaaggtctaaagttaggcatctacgctgatgtcggaaacaagacatgtgctggtttcccaggttcattcggttactatgacatagatgcgcagacgtttgctgattggggtgttgatttgttgaagtttgatggatgctactgcgattccctggagaacctagccgatgggtacaaacacatgagtttggctctaaacaggactggtaggccgatcgtctatagttgtgaatggcccttgtacatgtggccgtttcagaagccaaactacactgagataagacaatactgtaaccattggcgtaactttgctgacatagatgattcatgggcgtcaatcaaatctatcttggattggacttctcgtaaccaggaaagaattgttgatgttgcaggtccaggtggatggaatgaccctgatatgcttgtcatagggaactttgggctatcatgggaccaacaagttacacaaatggctttgtgggcgatcatggccggccccctattcatgtctaatgatctacgtgcgataccgccccaagcaaaggctttacttcaagataaggatgtcatagcgatcaaccaagatcctcttggtaaacaaggttatcaattgagaaaaggtgacaactttgaagtgtgggaaagaccattgtctggagacgcgtgggctgttgctattatcaaccgtcaagagatcggagggccaagatcttacactatcccggtagcctctttgggtaagggtgttgcgtgcaatcctgcctgcttcattacacaattgcttccagttaagagaaaattgggtttctatgaagcaacctctaggctaagaagtcacattaatcctactggtacggtattgttgcaattggagaacacaatgcaaacctctttgaaagatttgttataa

SEQ ID NO: 170 - protein, 398 aa, Artificial Sequence
  variant of human alpha-galactosidase A
LDNGLARTPPMGWLHWERFMCNLDCQEEPDSCISEKLFEEMAERMVTEGWKDAGYEYLCIDDCWMAPQRDSEGRLQADPQRFPHGIRQLANHVHSKGLKLGIYADVGNKTCAGFPGSFGYYDIDAQTFADWGVDLLKFDGCYCDSLENLADGYKHMSLALNRTGRPIVYSCEWPLYMWPFQKPNYTEIRQYCNHWRNFADIDDSWASIKSILDWTSRNQERIVDVAGPGGWNDPDMLVIGNFGLSWDQQVTQMALWAIMAGPLFMSNDLRAIPPQAKALLQDKDVIAINQDPLGKQGYQLRKGDNFEVWERPLSGDAWAVAIINRQEIGGPRSYTIPVASLGKGVACNPACFITQLLPVKRKLGFYEATSRLRSHINPTGTVLLQLENTMQTSLKDLL

SEQ ID NO: 171 - DNA, 1197 bp, Artificial Sequence
  variant of human alpha-galactosidase A
ttggataacgggttagcccgtacacctccgatgggttggcttcactgggaaagattcatgtgtaacttagattgccaagaagagcctgacagctgtatctcagagaaactattcgaagagatggctgaacggatggtaaccgaaggatggaaggatgctggttatgaatacctatgtattgatgattgctggatggctccacagcgtgattcagaaggtaggttacaagctgacccccagagattcccacatggcatacgtcagcttgcaaaccatgtacacagcaaaggtctaaagttaggcatctacgctgatgtcggaaacaagacatgtgctggtttcccaggttcattcggttactatgacatagatgcgcagacgtttgctgattggggtgttgatttgttgaagtttgatggatgctactgcgattccctggagaacctagccgatgggtacaaacacatgagtttggctctaaacaggactggtaggccgatcgtctatagttgtgaatggcccttgtacatgtggccgtttcagaagccaaactacactgagataagacaatactgtaaccattggcgtaactttgctgacatagatgattcatgggcttcaatcaaatctatcttggattggacttctcgtaaccaggaaagaattgttgatgttgcaggtccaggtggatggaatgaccctgatatgcttgtcatagggaactttgggctatcatgggaccaacaagttacacaaatggctttgtgggcgatcatggccggccccctattcatgtctaatgatctacgtgcgataccgccccaagcaaaggctttacttcaagataaggatgtcatagcgatcaaccaagatcctcttggtaaacaaggttatcaattgagaaaaggtgacaactttgaagtgtgggaaagaccattgtctggagacgcgtgggctgttgctattatcaaccgtcaagagatcggagggccaagatcttacactatcccggtagcctctttgggtggcggtgttgcgtgcaatcctgcctgcttcattacacaattgcttccagttaagagaaaattgggtttctatgaagcaacctctaggctaagaagtcacattaatcctactggtacggtattgttgcaattggagaacacaatgcaaacctctttgaaagatttgttataa

SEQ ID NO: 172 - protein, 398 aa, Artificial Sequence
  variant of human alpha-galactosidase A
LDNGLARTPPMGWLHWERFMCNLDCQEEPDSCISEKLFEEMAERMVTEGWKDAGYEYLCIDDCWMAPQRDSEGRLQADPQRFPHGIRQLANHVHSKGLKLGIYADVGNKTCAGFPGSFGYYDIDAQTFADWGVDLLKFDGCYCDSLENLADGYKHMSLALNRTGRPIVYSCEWPLYMWPFQKPNYTEIRQYCNHWRNFADIDDSWASIKSILDWTSRNQERIVDVAGPGGWNDPDMLVIGNFGLSWDQQVTQMALWAIMAGPLFMSNDLRAIPPQAKALLQDKDVIAINQDPLGKQGYQLRKGDNFEVWERPLSGDAWAVAIINRQEIGGPRSYTIPVASLGGGVACNPACFITQLLPVKRKLGFYEATSRLRSHINPTGTVLLQLENTMQTSLKDLL

SEQ ID NO: 173 - DNA, 1197 bp, Artificial Sequence
  variant of human alpha-galactosidase A
ttggataacgggttagcccgtacacctccgatgggttggcttcactgggaaagattcatgtgtaacttagattgccaagaagagcctgacagctgtatctcagagaaactattcgaagagatggctgaacggatggtagacgaaggatggaaggatgctggttatgaatacctatgtattgatgattgctggatggctccacagcgtgattcagaaggtaggttacaagctgacccccagagattcccacatggcatacgtcagcttgcaaaccatgtacacagcaaaggtctaaagttaggcatctacgctgatgtcggaaacaagacatgtgctggtttcccaggttcattcggttactatgacatagatgcgcagacgtttgctgattggggtgttgatttgttgaagtttgatggatgctactgcgattccctggagaacctagccgatgggtacaaacacatgagtttggctctaaacaggactggtaggccgatcgtctatagttgtgaatggcccttgtacatgtggccgtttcagaagccaaactacactgagataagacaatactgtaaccattggcgtaactttgctgacatagatgattcatgggcgtcaatcaaatctatcttggattggacttctcgtaaccaggaaagaattgttgatgttgcaggtccaggtggatggaatgaccctgatatgcttgtcatagggaactttgggctatcatgggaccaacaagttacacaaatggctttgtgggcgatcatggccggccccctattcatgtctaatgatctacgtgcgataagcccccaagcaaaggctttacttcaagataaggatgtcatagcgatcaaccaagatcctcttggtaaacaaggttatcaattgagaaaaggtgacaactttgaagtgtgggaaagaccattgtctggagacgcgtgggctgttgctattatcaaccgtcaagagatcggagggccaagatcttacactatcccggtagcctctttgggtaaaggtgttgcgtgcaatcctgcctgcttcattacacaattgcttccagttaagagaaaattgggtttctatgaagcaacctctaggctaagaagtcacattaatcctactggtacggtattgttgcaattggagaacacaatgcaaacctctttgaaagatttgttataa

SEQ ID NO: 174 - protein, 398 aa, Artificial Sequence
  variant of human alpha-galactosidase A
LDNGLARTPPMGWLHWERFMCNLDCQEEPDSCISEKLFEEMAERMVDEGWKDAGYEYLCIDDCWMAPQRDSEGRLQADPQRFPHGIRQLANHVHSKGLKLGIYADVGNKTCAGFPGSFGYYDIDAQTFADWGVDLLKFDGCYCDSLENLADGYKHMSLALNRTGRPIVYSCEWPLYMWPFQKPNYTEIRQYCNHWRNFADIDDSWASIKSILDWTSRNQERIVDVAGPGGWNDPDMLVIGNFGLSWDQQVTQMALWAIMAGPLFMSNDLRAISPQAKALLQDKDVIAINQDPLGKQGYQLRKGDNFEVWERPLSGDAWAVAIINRQEIGGPRSYTIPVASLGKGVACNPACFITQLLPVKRKLGFYEATSRLRSHINPTGTVLLQLENTMQTSLKDLL

SEQ ID NO: 175 - DNA, 1197 bp, Artificial Sequence
  variant of human alpha-galactosidase A
ttggataacgggttagcccgtacacctccgatgggttggcttcactgggaaagattcatgtgtaacttagattgccaagaagagcctgacagctgtatctcagagaaactattcgaagagatggctgaacggatggtagacgaaggatggaaggatgctggttatgaatacctatgtattgatgattgctggatggctccacagcgtgattcagaaggtaggttacaagctgacccccagagattcccacatggcatacgtcagcttgcaaaccatgtacacagcaaaggtctaaagttaggcatctacgctgatgtcggaaacaagacatgtgctggtttcccaggttcattcggttactatgacatagatgcgcagacgtttgctgattggggtgttgatttgttgaagtttgatggatgctactgcgattccctggagaacctagccgatgggtacaaacacatgagtttggctctaaacaggactggtaggccgatcgtctatagttgtgaatggcccttgtacatgtggccgtttcagaagccaaactacactgagataagacaatactgtaaccattggcgtaactttgctgacatagatgattcatgggcgtcaatcaaatctatcttggattggacttctcgtaaccaggaaagaattgttgatgttgcaggtccaggtggatggaatgaccctgatatgcttgtcatagggaactttgggctatcatgggaccaacaagttacacaaatggctttgtgggcgatcatggccggccccctattcatgtctaatgatctacgtgcgatatcaccccaagcaaaggctttacttcaagataaggatgtcatagcgatcaaccaagatcctcttggtaaacaaggttatcaattgagaaaaggtgacaactttgaagtgtgggaaagaccattgtctggagacgcgtgggctgttgctattatcaaccgtcaagagatcggagggccaagatcttacactatcccggtagcctctttgggtggcggtgttgcgtgcaatcctgcctgcttcattacacaattgcttccagttaagagaaaattgggtttctatgaagcaacctctaggctaagaagtcacattaatcctactggtacggtattgttgcaattggagaacacaatgcaaacctctttgaaagatttgttataa

SEQ ID NO: 176 - protein, 398 aa, Artificial Sequence
  variant of human alpha-galactosidase A
LDNGLARTPPMGWLHWERFMCNLDCQEEPDSCISEKLFEEMAERMVDEGWKDAGYEYLCIDDCWMAPQRDSEGRLQADPQRFPHGIRQLANHVHSKGLKLGIYADVGNKTCAGFPGSFGYYDIDAQTFADWGVDLLKFDGCYCDSLENLADGYKHMSLALNRTGRPIVYSCEWPLYMWPFQKPNYTEIRQYCNHWRNFADIDDSWASIKSILDWTSRNQERIVDVAGPGGWNDPDMLVIGNFGLSWDQQVTQMALWAIMAGPLFMSNDLRAISPQAKALLQDKDVIAINQDPLGKQGYQLRKGDNFEVWERPLSGDAWAVAIINRQEIGGPRSYTIPVASLGGGVACNPACFITQLLPVKRKLGFYEATSRLRSHINPTGTVLLQLENTMQTSLKDLL

SEQ ID NO: 177 - DNA, 1197 bp, Artificial Sequence
  variant of human alpha-galactosidase A
ttggataacgggttagcccgtacacctccgatgggttggcttcactgggaaagattcatgtgtaacttagattgccaagaagagcctgacagctgtatctcagagaaactattcgaagagatggctgaacggatggtagacgaaggatggaaggatgctggttatgaatacctatgtattgatgattgctggatggctccacagcgtgattcagaaggtaggttacaagctgacccccagagattcccacatggcataaagcagcttgcaaatcatgtacacgagctgggtctaaagttaggcatctacgctgatgtcggaaacaagacatgtgctggtttcccaggttcattcggttactatgacatagatgcgcagacgtttgctgattggggtgttgatttgttgaagtttgatggatgctactgcgattccctggagaacctagccgatgggtacaaacacatgagtcgtgctctaaaccatactggtaggccgatcgtctatagttgtgaatggcccttgtacatgtggccgtttcagaagccaaactacactgagataagacaatactgtaaccattggcgtaactttgctgacatagatgattcatgggcgtcaatcaaatctatcttggattggacttctcgtaaccaggaaagaattgttgatgttgcaggtccaggtggatggaatgaccctgatatgcttgtcatagggaactttgggctatcatgggaccaacaagttacacaaatggctttgtgggcgatcatggccggccccctattcatgtctaatgatctacgtgcgatatcaccccaagcaaaggctttacttcaagataaggatgtcatagcgatcaaccaagatcctcttggtaaacaaggttatcaattgagaaaaggtgacaactttgaagtgtgggaaagaccattgtctggagacgcgtgggctgttgctattatcaaccgtcaagagatcggagggccaagatcttacactatcccggtagcctctttgggtaagggtgttgcgtgcaatcctgcctgcttcattacacaattgcttccagttaagagaaaattgggtttctatgaagcaacctctaggctaagaagtcacattaatcctactggtacggtattgttgcaattggagaacacaatgcaaacctctttgaaagatttgttataa

SEQ ID NO: 178 - protein, 398 aa, Artificial Sequence
  variant of human alpha-galactosidase A
LDNGLARTPPMGWLHWERFMCNLDCQEEPDSCISEKLFEEMAERMVDEGWKDAGYEYLCIDDCWMAPQRDSEGRLQADPQRFPHGIKQLANHVHELGLKLGIYADVGNKTCAGFPGSFGYYDIDAQTFADWGVDLLKFDGCYCDSLENLADGYKHMSRALNHTGRPIVYSCEWPLYMWPFQKPNYTEIRQYCNHWRNFADIDDSWASIKSILDWTSRNQERIVDVAGPGGWNDPDMLVIGNFGLSWDQQVTQMALWAIMAGPLFMSNDLRAISPQAKALLQDKDVIAINQDPLGKQGYQLRKGDNFEVWERPLSGDAWAVAIINRQEIGGPRSYTIPVASLGKGVACNPACFITQLLPVKRKLGFYEATSRLRSHINPTGTVLLQLENTMQTSLKDLL

SEQ ID NO: 179 - DNA, 1197 bp, Artificial Sequence
  variant of human alpha-galactosidase A
ttggataacgggttagcccgtacacctccgatgggttggcttcactgggaaagattcatgtgtaacttagattgccaagaagagcctgacagctgtatctcagagaaactattcgaagagatggctgaacggatggtagacgaaggatggaaggatgctggttatgaatacctatgtattgatgattgctggatggctccacagcgtgattcagaaggtaggttacaagctgacccccagagattcccacatggcatacgtcagcttgcaaaccatgtacacagcaaaggtctaaagttaggcatctacgctgatgtcggaaacaagacatgtgctggtttcccaggttcattcggttactatgacatagatgcgcagacgtttgctgattggggtgttgatttgttgaagtttgatggatgctactgcgattccctggagaacctagccgatgggtacaaacacatgagtttggctctaaacaggactggtaggccgatcgtctatagttgtgaatggcccttgtacatgtggccgtttcagaagccaaactacactgagataagacaatactgtaaccattggcgtaactttgctgacatagatgattcatgggcttcaatcaaatctatcttggattggacttctcgtaaccaggaaagaattgttgatgttgcaggtccaggtggatggaatgaccctgatatgcttgtcatagggaactttgggctatcatgggaccaacaagttacacaaatggctttgtgggcgatcatggccggccccctattcatgtctaatgatctacgtgcgataccgccccaagcaaaggctttacttcaagataaggatgtcatagcgatcaaccaagatcctcttggtaaacaaggttatcaattgagaaaaggtgacaactttgaagtgtgggaaagaccattgtctggagacgcgtgggctgttgctattatcaaccgtcaagagatcggagggccaagatcttacactatcccggtagcctctttgggtaagggtgttgcgtgcaatcctgcctgcttcattacacaattgcttccagttaagagaaaattgggtttctatgaagcaacctctaggctaagaagtcacattaatcctactggtacggtattgttgcaattggagaacacaatgcaaacctctttgaaagatttgttataa

SEQ ID NO: 180 - protein, 398 aa, Artificial Sequence
  variant of human alpha-galactosidase A
LDNGLARTPPMGWLHWERFMCNLDCQEEPDSCISEKLFEEMAERMVDEGWKDAGYEYLCIDDCWMAPQRDSEGRLQADPQRFPHGIRQLANHVHSKGLKLGIYADVGNKTCAGFPGSFGYYDIDAQTFADWGVDLLKFDGCYCDSLENLADGYKHMSLALNRTGRPIVYSCEWPLYMWPFQKPNYTEIRQYCNHWRNFADIDDSWASIKSILDWTSRNQERIVDVAGPGGWNDPDMLVIGNFGLSWDQQVTQMALWAIMAGPLFMSNDLRAIPPQAKALLQDKDVIAINQDPLGKQGYQLRKGDNFEVWERPLSGDAWAVAIINRQEIGGPRSYTIPVASLGKGVACNPACFITQLLPVKRKLGFYEATSRLRSHINPTGTVLLQLENTMQTSLKDLL

SEQ ID NO: 181 - DNA, 1197 bp, Artificial Sequence
  variant of human alpha-galactosidase A
ttggataacgggttagcccgtacacctccgatgggttggcttcactgggaaagattcatgtgtaacttagattgccaagaagagcctgacagctgtatctcagagaaactattcgaagagatggctgaacggatggtagacgaaggatggaaggatgctggttatgaatacctatgtattgatgattgctggatggctccacagcgtgattcagaaggtaggttacaagctgacccccagagattcccacatggcatacgccagcttgcaaatcatgtacacgagaagggtctaaagttaggcatctacgctgatgtcggaaacaagacatgtgctggtttcccaggttcattcggttactatgacatagatgcgcagacgtttgctgattggggtgttgatttgttgaagtttgatggatgctactgcgattccctggagaacctagccgatgggtacaaacacatgagtctggctctaaaccgtactggtaggccgatcgtctatagttgtgaatggcccttgtacatgtggccgtttcagaagccaaactacactgagataagacaatactgtaaccattggcgtaactttgctgacatagatgattcatgggcttcaatcaaatctatcttggattggacttctcgtaaccaggaaagaattgttgatgttgcaggtccaggtggatggaatgaccctgatatgcttgtcatagggaactttgggctatcatgggaccaacaagttacacaaatggctttgtgggcgatcatggccggccccctattcatgtctaatgatctacgtgcgatatcaccccaagcaaaggctttacttcaagataaggatgtcatagcgatcaaccaagatcctcttggtaaacaaggttatcaattgagaaaaggtgacaactttgaagtgtgggaaagaccattgtctggagacgcgtgggctgttgctattatcaaccgtcaagagatcggagggccaagatcttacactatcccggtagcctctttgggtaaaggtgttgcgtgcaatcctgcctgcttcattacacaattgcttccagttaagagaaaattgggtttctatgaagcaacctctaggctaagaagtcacattaatcctactggtacggtattgttgcaattggagaacacaatgcaaacctctttgaaagatttgttataa

SEQ ID NO: 182 - protein, 398 aa, Artificial Sequence
  variant of human alpha-galactosidase A
LDNGLARTPPMGWLHWERFMCNLDCQEEPDSCISEKLFEEMAERMVDEGWKDAGYEYLCIDDCWMAPQRDSEGRLQADPQRFPHGIRQLANHVHEKGLKLGIYADVGNKTCAGFPGSFGYYDIDAQTFADWGVDLLKFDGCYCDSLENLADGYKHMSLALNRTGRPIVYSCEWPLYMWPFQKPNYTEIRQYCNHWRNFADIDDSWASIKSILDWTSRNQERIVDVAGPGGWNDPDMLVIGNFGLSWDQQVTQMALWAIMAGPLFMSNDLRAISPQAKALLQDKDVIAINQDPLGKQGYQLRKGDNFEVWERPLSGDAWAVAIINRQEIGGPRSYTIPVASLGKGVACNPACFITQLLPVKRKLGFYEATSRLRSHINPTGTVLLQLENTMQTSLKDLL

SEQ ID NO: 183 - DNA, 1197 bp, Artificial Sequence
  variant of human alpha-galactosidase A
ttggataacgggttagcccgtacacctccgatgggttggcttcactgggaaagattcatgtgtaacttagattgccaagaagagcctgacagctgtatctcagagaaactattcgaagagatggctgaacggatggtaaccgaaggatggaaggatgctggttatgaatacctatgtattgatgattgctggatggctccacagcgtgattcagaaggtaggttacaagctgacccccagagattcccacatggcatacgtcagcttgcaaaccatgtacacagcaaaggtctaaagttaggcatctacgctgatgtcggaaacaagacatgtgctggtttcccaggttcattcggttactatgacatagatgcgcagacgtttgctgattggggtgttgatttgttgaagtttgatggatgctactgcgattccctggagaacctagccgatgggtacaaacacatgagtttggctctaaacaggactggtaggccgatcgtctatagttgtgaatggcccttgtacatggggccgtttcagaagccaaactacactgagataagacaatactgtaaccattggcgtaactttgctgacatagatgattcatgggcttcaatcaaatctatcttggattggacttctcgtaaccaggaaagaattgttgatgttgcaggtccaggtggatggaatgaccctgatatgcttgtcatagggaactttgggctatcatgggaccaacaagttacacaaatggctttgtgggcgatcatggccggccccctattcatgtctaatgatctacgtgcgatatcaccccaagcaaaggctttacttcaagataaggatgtcatagcgatcaaccaagatcctcttggtaaacaaggttatcaattgagaaaaggtgacaactttgaagtgtgggaaagaccattgtctggagacgcgtgggctgttgctattatcaaccgtcaagagatcggagggccaagatcttacactatcccggtagcctctttgggtaagggtgttgcgtgcaatcctgcctgcttcattacacaattgcttccagttaagagaaaattgggtttctatgaagcaacctctaggctaagaagtcacattaatcctactggtacggtattgttgcaattggagaacacaatgcaaacctctttgaaagatttgttataa

SEQ ID NO: 184 - protein, 398 aa, Artificial Sequence
  variant of human alpha-galactosidase A
LDNGLARTPPMGWLHWERFMCNLDCQEEPDSCISEKLFEEMAERMVTEGWKDAGYEYLCIDDCWMAPQRDSEGRLQADPQRFPHGIRQLANHVHSKGLKLGIYADVGNKTCAGFPGSFGYYDIDAQTFADWGVDLLKFDGCYCDSLENLADGYKHMSLALNRTGRPIVYSCEWPLYMGPFQKPNYTEIRQYCNHWRNFADIDDSWASIKSILDWTSRNQERIVDVAGPGGWNDPDMLVIGNFGLSWDQQVTQMALWAIMAGPLFMSNDLRAISPQAKALLQDKDVIAINQDPLGKQGYQLRKGDNFEVWERPLSGDAWAVAIINRQEIGGPRSYTIPVASLGKGVACNPACFITQLLPVKRKLGFYEATSRLRSHINPTGTVLLQLENTMQTSLKDLL

SEQ ID NO: 185 - DNA, 1197 bp, Artificial Sequence
  variant of human alpha-galactosidase A
ttggataacgggttagcccgtacacctccgatgggttggcttcactgggaaagattcatgtgtaacttagattgccaagaagagcctgacagctgtatctcagagaaactattcgaagagatggctgaacggatggtaaccgaaggatggaaggatgctggttatgaatacctatgtattgatgattgctggatggctccacagcgtgattcagaaggtaggttacaagctgacccccagagattcccacatggcatacgtcagcttgcaaaccatgtacacagcaaaggtctaaagttaggcatctacgctgatgtcggaaacaagacatgtgctggtttcccaggttcattcggttactatgacatagatgcgcagacgtttgctgattggggtgttgatttgttgaagtttgatggatgctactgcgattccctggagaacctagccgatgggtacaaacacatgagtttggctctaaacaggactggtaggccgatcgtctatagttgtgaatggcccttgtacatgtggccgtttcagaagccaaactacactgagataagacaatactgtaaccattggcgtaactttgctgacatagatgattcatgggcttcaatcaaatctatcttggattggacttctcgtaaccaggaaagaattgttgatgttgcaggtccaggtggatggaatgaccctgatatgcttgtcatagggaactttgggctatcatgggaccaacaagttacacaaatggctttgtgggcgatcatggccggccccctattcatgtctaatgatctacgtgcgatatcaccccaagcaaaggctttacttcaagataaggatgtcatagcgatcaaccaagatcctcttggtaaacaaggttatcaattgagaaaaggtgacaactttgaagtgtgggaaagaccattgtctggagacgcgtgggctgttgctattatcaaccgtcaagagatcggagggccaagatcttacactatcccggtagcctctttgggtaagggtgttgcgtgcaatcctgcctgcttcattacacaattgcttccagttaagagaaaattgggtttctatgaagcaacctctaggctaagaagtcacattaatcctactggtacggtattgttgcaattggagaacaagatgcaaacctctttgaaagatttgttataa

SEQ ID NO: 186 - protein, 398 aa, Artificial Sequence
  variant of human alpha-galactosidase A
LDNGLARTPPMGWLHWERFMCNLDCQEEPDSCISEKLFEEMAERMVTEGWKDAGYEYLCIDDCWMAPQRDSEGRLQADPQRFPHGIRQLANHVHSKGLKLGIYADVGNKTCAGFPGSFGYYDIDAQTFADWGVDLLKFDGCYCDSLENLADGYKHMSLALNRTGRPIVYSCEWPLYMWPFQKPNYTEIRQYCNHWRNFADIDDSWASIKSILDWTSRNQERIVDVAGPGGWNDPDMLVIGNFGLSWDQQVTQMALWAIMAGPLFMSNDLRAISPQAKALLQDKDVIAINQDPLGKQGYQLRKGDNFEVWERPLSGDAWAVAIINRQEIGGPRSYTIPVASLGKGVACNPACFITQLLPVKRKLGFYEATSRLRSHINPTGTVLLQLENKMQTSLKDLL

SEQ ID NO: 187 - DNA, 1197 bp, Artificial Sequence
  variant of human alpha-galactosidase A
ttggataacgggttagcccgtacacctccgatgggttggcttcactgggaaagattcatgtgtaacttagattgccaagaagagcctgacagctgtatctcagagaaactattcgaagagatggctgaacggatggtaaccgaaggatggaaggatgctggttatgaatacctatgtattgatgattgctggatggctccacagcgtgattcagaaggtaggttacaagctgacccccagagattcccacatggcatacgtcagcttgcaaaccatgtacacagcaaaggtctaaagttaggcatctacgctgatgtcggaaacaagacatgtgctggtttcccaggttcattcggttactatgacatagatgcgcagacgtttgctgattggggtgttgatttgttgaagtttgatggatgctactgcgattccctggagaacctagccgatgggtacaaacacatgagtttggctctaaacaggactggtaggccgatcgtctatagttgtgaatggcccttgtacatgtggccgacgcagaagccaaactacactgagataagacaatactgtaaccattggcgtaactttgctgacatagatgattcatgggcttcaatcaaatctatcttggattggacttctcgtaaccaggaaagaattgttgatgttgcaggtccaggtggatggaatgaccctgatatgcttgtcatagggaactttgggctatcatgggaccaacaagttacacaaatggctttgtgggcgatcatggccggccccctattcatgtctaatgatctacgtgcgatatcaccccaagcaaaggctttacttcaagataaggatgtcatagcgatcaaccaagatcctcttggtaaacaaggttatcaattgagaaaaggtgacaactttgaagtgtgggaaagaccattgtctggagacgcgtgggctgttgctattatcaaccgtcaagagatcggagggccaagatcttacactatcccggtagcctctttgggtaagggtgttgcgtgcaatcctgcctgcttcattacacaattgcttccagttaagagaaaattgggtttctatgaagcaacctctaggctaagaagtcacattaatcctactggtacggtattgttgcaattggagaacacaatgcaaacctctttgaaagatttgttataa

SEQ ID NO: 188 - protein, 398 aa, Artificial Sequence
  variant of human alpha-galactosidase A
LDNGLARTPPMGWLHWERFMCNLDCQEEPDSCISEKLFEEMAERMVTEGWKDAGYEYLCIDDCWMAPQRDSEGRLQADPQRFPHGIRQLANHVHSKGLKLGIYADVGNKTCAGFPGSFGYYDIDAQTFADWGVDLLKFDGCYCDSLENLADGYKHMSLALNRTGRPIVYSCEWPLYMWPTQKPNYTEIRQYCNHWRNFADIDDSWASIKSILDWTSRNQERIVDVAGPGGWNDPDMLVIGNFGLSWDQQVTQMALWAIMAGPLFMSNDLRAISPQAKALLQDKDVIAINQDPLGKQGYQLRKGDNFEVWERPLSGDAWAVAIINRQEIGGPRSYTIPVASLGKGVACNPACFITQLLPVKRKLGFYEATSRLRSHINPTGTVLLQLENTMQTSLKDLL

SEQ ID NO: 189 - DNA, 1197 bp, Artificial Sequence
  variant of human alpha-galactosidase A
ttggataacgggttagcccgtacacctccgatgggttggcttcactgggaaagattcatgtgtaacttagattgccaagaagagcctgacagctgtatctcagagaaactattcgaagagatggctgaacggatggtaaccgaaggatggaaggatgctggttatgaatacctatgtattgatgattgctggatggctccacagcgtgattcagaaggtaggttacaagctgacccccagagattcccacatggcatacgtcagcttgcaaaccatgtacacagcaaaggtctaaagttaggcatctacgctgatgtcggaaacaagacatgtgctggtttcccaggttcattcggttactatgacatagatgcgcagacgtttgctgattggggtgttgatttgttgaagtttgatggatgctactgcgattccctggagaacctagccgatgggtacaaacacatgagtttggctctaaacaggactggtaggccgatcgtctatagttgtgaatggcccttgtacatgtggccgtttcagaagccaaactacactgagataagacaatactgtaaccattggcgtaactttgctgacatagatgattcatgggcttcaatcaaatctatcttggattggacttctcgtaaccaggaaagaattgttgatgttgcaggtccaggtggatggaatgaccctgatatgcttgtcatagggaactttgggctatcatgggaccaacaagttacacaaatggctttgtgggcgatcatggccggccccctattcatgtctaatgatctacgtgcgatatcaccccaagcaaaggctttacttcaagataaggatgtcatagcgatcaaccaagatcctcttggtaaacaaggttatcaattgagaaaaggtgacaactttgaagtgtgggaaagaccattgtctggagacgcgtgggctgttgctattatcaaccgtcaagagatcggagggccaagatcttacactatcccggtagcctctttgggtaagggtgttgcgtgcaatcctgcctgcttcattacacaattgcttccagttaagagaaaattgggtgcgtatgaagcaacctctaggctaagaagtcacattaatcctactggtacggtattgttgcaattggagaacacaatgcaaacctctttgaaagatttgttataa

SEQ ID NO: 190 - protein, 398 aa, Artificial Sequence
  variant of human alpha-galactosidase A
LDNGLARTPPMGWLHWERFMCNLDCQEEPDSCISEKLFEEMAERMVTEGWKDAGYEYLCIDDCWMAPQRDSEGRLQADPQRFPHGIRQLANHVHSKGLKLGIYADVGNKTCAGFPGSFGYYDIDAQTFADWGVDLLKFDGCYCDSLENLADGYKHMSLALNRTGRPIVYSCEWPLYMWPFQKPNYTEIRQYCNHWRNFADIDDSWASIKSILDWTSRNQERIVDVAGPGGWNDPDMLVIGNFGLSWDQQVTQMALWAIMAGPLFMSNDLRAISPQAKALLQDKDVIAINQDPLGKQGYQLRKGDNFEVWERPLSGDAWAVAIINRQEIGGPRSYTIPVASLGKGVACNPACFITQLLPVKRKLGAYEATSRLRSHINPTGTVLLQLENTMQTSLKDLL

SEQ ID NO: 191 - DNA, 1197 bp, Artificial Sequence
  variant of human alpha-galactosidase A
ttggataacgggttagcccgtacacctccgatgggttggcttcactgggaaagattcatgtgtaacttagattgccaagaagagcctgacagctgtatctcagagaaactattcgaagagatggctgaacggatggtaaccgaaggatggaaggatgctggttatgaatacctatgtattgatgattgctggatggctccacagcgtgattcagaaggtaggttacaagctgacccccagagattcccacatggcatacgtcagcttgcaaaccatgtacacagcaaaggtctaaagttaggcatctacgctgatgtcggaaacaagacatgtgctggtttcccaggttcattcggttactatgacatagatgcgcagacgtttgctgattggggtgttgatttgttgaagtttgatggatgctactgcgattccctggagaacctagccgatgggtacaaacacatgagtttggctctaaacaggactggtaggccgatcgtctatagttgtgaatggcccttgtacatgtggccggttcagaagccaaactacactgagataagacaatactgtaaccattggcgtaactttgctgacatagatgattcatgggcttcaatcaaatctatcttggattggacttctcgtaaccaggaaagaattgttgatgttgcaggtccaggtggatggaatgaccctgatatgcttgtcatagggaactttgggctatcatgggaccaacaagttacacaaatggctttgtgggcgatcatggccggccccctattcatgtctaatgatctacgtgcgatatcaccccaagcaaaggctttacttcaagataaggatgtcatagcgatcaaccaagatcctcttggtaaacaaggttatcaattgagaaaaggtgacaactttgaagtgtgggaaagaccattgtctggagacgcgtgggctgttgctattatcaaccgtcaagagatcggagggccaagatcttacactatcccggtagcctctttgggtaagggtgttgcgtgcaatcctgcctgcttcattacacaattgcttccagttaagagaaaattgggtttctatgaagcaacctctaggctaagaagtcacattaatcctactggtacggtattgttgcaattggagaacacaatgcaaacctctttgaaagatttgttataa

SEQ ID NO: 192 - protein, 398 aa, Artificial Sequence
  variant of human alpha-galactosidase A
LDNGLARTPPMGWLHWERFMCNLDCQEEPDSCISEKLFEEMAERMVTEGWKDAGYEYLCIDDCWMAPQRDSEGRLQADPQRFPHGIRQLANHVHSKGLKLGIYADVGNKTCAGFPGSFGYYDIDAQTFADWGVDLLKFDGCYCDSLENLADGYKHMSLALNRTGRPIVYSCEWPLYMWPVQKPNYTEIRQYCNHWRNFADIDDSWASIKSILDWTSRNQERIVDVAGPGGWNDPDMLVIGNFGLSWDQQVTQMALWAIMAGPLFMSNDLRAISPQAKALLQDKDVIAINQDPLGKQGYQLRKGDNFEVWERPLSGDAWAVAIINRQEIGGPRSYTIPVASLGKGVACNPACFITQLLPVKRKLGFYEATSRLRSHINPTGTVLLQLENTMQTSLKDLL

SEQ ID NO: 193 - DNA, 1197 bp, Artificial Sequence
  variant of human alpha-galactosidase A
ttggataacgggttagcccgtacacctccgatgggttggcttcactgggaaagattcatgtgtaacttagattgccaagaagagcctgacagctgtatctcagagaaactattcgaagagatggctgaacggatggtaaccgaaggatggaaggatgctggttatgaatacctatgtattgatgattgctggatggctccacagcgtgattcagaaggtaggttacaagctgacccccagagattcccacatggcatacgtcagcttgcaaaccatgtacacagcaaaggtctaaagttaggcatctacgctgatgtcggaaacaagacatgtgctggtttcccaggttcattcggttactatgacatagatgcgcagacgtttgctgattggggtgttgatttgttgaagtttgatggatgctactgcgattccctggagaacctagccgatgggtacaaacacatgagtgcggctctaaacaggactggtaggccgatcgtctatagttgtgaatggcccttgtacatgtggccgtttcagaagccaaactacactgagataagacaatactgtaaccattggcgtaactttgctgacatagatgattcatgggcttcaatcaaatctatcttggattggacttctcgtaaccaggaaagaattgttgatgttgcaggtccaggtggatggaatgaccctgatatgcttgtcatagggaactttgggctatcatgggaccaacaagttacacaaatggctttgtgggcgatcatggccggccccctattcatgtctaatgatctacgtgcgatatcaccccaagcaaaggctttacttcaagataaggatgtcatagcgatcaaccaagatcctcttggtaaacaaggttatcaattgagaaaaggtgacaactttgaagtgtgggaaagaccattgtctggagacgcgtgggctgttgctattatcaaccgtcaagagatcggagggccaagatcttacactatcccggtagcctctttgggtaagggtgttgcgtgcaatcctgcctgcttcattacacaattgcttccagttaagagaaaattgggtttctatgaagcaacctctaggctaagaagtcacattaatcctactggtacggtattgttgcaattggagaacacaatgcaaacctctttgaaagatttgttataa

SEQ ID NO: 194 - protein, 398 aa, Artificial Sequence
  variant of human alpha-galactosidase A
LDNGLARTPPMGWLHWERFMCNLDCQEEPDSCISEKLFEEMAERMVTEGWKDAGYEYLCIDDCWMAPQRDSEGRLQADPQRFPHGIRQLANHVHSKGLKLGIYADVGNKTCAGFPGSFGYYDIDAQTFADWGVDLLKFDGCYCDSLENLADGYKHMSAALNRTGRPIVYSCEWPLYMWPFQKPNYTEIRQYCNHWRNFADIDDSWASIKSILDWTSRNQERIVDVAGPGGWNDPDMLVIGNFGLSWDQQVTQMALWAIMAGPLFMSNDLRAISPQAKALLQDKDVIAINQDPLGKQGYQLRKGDNFEVWERPLSGDAWAVAIINRQEIGGPRSYTIPVASLGKGVACNPACFITQLLPVKRKLGFYEATSRLRSHINPTGTVLLQLENTMQTSLKDLL

SEQ ID NO: 195 - DNA, 1197 bp, Artificial Sequence
  variant of human alpha-galactosidase A
ttggataacgggttagcccgtacacctccgatgggttggcttcactgggaaagattcatgtgtaacttagattgccaagaagagcctgacagctgtatctcagagaaactattcgaagagatggctgaacggatggtaaccgaaggatggaaggatgctggttatgaatacctatgtattgatgattgctggatggctccacagcgtgattcagaaggtaggttacaagctgacccccagagattcccacatggcatacgtcagcttgcaaaccatgtacacagcaaaggtctaaagttaggcatctacgctgatgtcggaaacaagacatgtgctggtttcccaggttcattcggttactatgacatagatgcgcagacgtttgctgattggggtgttgatttgttgaagtttgatggatgctactgcgattccctggagaacctagccgatgggtacaaacacatgagtttggctctaaacaggactggtaggccgatcgtctatagttgtgaatggcccttgtacatgtggccgctgcagaagccaaactacactgagataagacaatactgtaaccattggcgtaactttgctgacatagatgattcatgggcttcaatcaaatctatcttggattggacttctcgtaaccaggaaagaattgttgatgttgcaggtccaggtggatggaatgaccctgatatgcttgtcatagggaactttgggctatcatgggaccaacaagttacacaaatggctttgtgggcgatcatggccggccccctattcatgtctaatgatctacgtgcgatatcaccccaagcaaaggctttacttcaagataaggatgtcatagcgatcaaccaagatcctcttggtaaacaaggttatcaattgagaaaaggtgacaactttgaagtgtgggaaagaccattgtctggagacgcgtgggctgttgctattatcaaccgtcaagagatcggagggccaagatcttacactatcccggtagcctctttgggtaagggtgttgcgtgcaatcctgcctgcttcattacacaattgcttccagttaagagaaaattgggtttctatgaagcaacctctaggctaagaagtcacattaatcctactggtacggtattgttgcaattggagaacacaatgcaaacctctttgaaagatttgttataa

SEQ ID NO: 196 - protein, 398 aa, Artificial Sequence
  variant of human alpha-galactosidase A
LDNGLARTPPMGWLHWERFMCNLDCQEEPDSCISEKLFEEMAERMVTEGWKDAGYEYLCIDDCWMAPQRDSEGRLQADPQRFPHGIRQLANHVHSKGLKLGIYADVGNKTCAGFPGSFGYYDIDAQTFADWGVDLLKFDGCYCDSLENLADGYKHMSLALNRTGRPIVYSCEWPLYMWPLQKPNYTEIRQYCNHWRNFADIDDSWASIKSILDWTSRNQERIVDVAGPGGWNDPDMLVIGNFGLSWDQQVTQMALWAIMAGPLFMSNDLRAISPQAKALLQDKDVIAINQDPLGKQGYQLRKGDNFEVWERPLSGDAWAVAIINRQEIGGPRSYTIPVASLGKGVACNPACFITQLLPVKRKLGFYEATSRLRSHINPTGTVLLQLENTMQTSLKDLL

SEQ ID NO: 197 - DNA, 1197 bp, Artificial Sequence
  variant of human alpha-galactosidase A
ttggataacgggttagcccgtacacctccgatgggttggcttcactgggaaagattcatgtgtaacttagattgccaagaagagcctgacagctgtatctcagagaaactattcgaagagatggctgaacggatggtaaccgaaggatggaaggatgctggttatgaatacctatgtattgatgattgctggatggctccacagcgtgattcagaaggtaggttacaagctgacccccagagattcccacatggcatacgtcagcttgcaaaccatgtacacagcaaaggtctaaagttaggcatctacgctgatgtcggaaacaagacatgtgctggtttcccaggttcattcggttactatgacatagatgcgcagacgtttgctgattggggtgttgatttgttgaagtttgatggatgctactgcgattccctggagaacctagccgatgggtacaaacacatgagtttggctctaaacaggactggtaggccgatcgtctatagttgtgaatggcccttgtacatgtggccgtttcagaagccaaactacactgagataagacaatactgtaaccattggcgtaactttgctgacatagatgattcatgggcttcaatcaaatctatcttggattggacttctcgtaaccaggaaagaattgttgatgttgcaggtccaggtggatggaatgaccctgatatgcttgtcatagggaactttgggctatcatgggaccaacaagttacacaaatggctttgtgggcgatcatggccggccccctattcatgtctaatgatctacgtgcgatatcaccccaagcaaaggctttacttcaagataaggatgtcatagcgatcaaccaagatcctcttggtaaacaaggttatcaattgagaaaaggtgacaactttgaagtgtgggaaagaccattgtctggagacgcgtgggctgttgctattatcaaccgtcaagagatcggagggccaagatcttacactatcccggtagcctctttgggtaagggtgttgcgtgcaatcctgcctgcttcattacacaattgcttccagttaagagaaaattgggtttctatgaagcaaccggtaggctaagaagtcacattaatcctactggtacggtattgttgcaattggagaacacaatgcaaacctctttgaaagatttgttataa

SEQ ID NO: 198 - protein, 398 aa, Artificial Sequence
  variant of human alpha-galactosidase A
LDNGLARTPPMGWLHWERFMCNLDCQEEPDSCISEKLFEEMAERMVTEGWKDAGYEYLCIDDCWMAPQRDSEGRLQADPQRFPHGIRQLANHVHSKGLKLGIYADVGNKTCAGFPGSFGYYDIDAQTFADWGVDLLKFDGCYCDSLENLADGYKHMSLALNRTGRPIVYSCEWPLYMWPFQKPNYTEIRQYCNHWRNFADIDDSWASIKSILDWTSRNQERIVDVAGPGGWNDPDMLVIGNFGLSWDQQVTQMALWAIMAGPLFMSNDLRAISPQAKALLQDKDVIAINQDPLGKQGYQLRKGDNFEVWERPLSGDAWAVAIINRQEIGGPRSYTIPVASLGKGVACNPACFITQLLPVKRKLGFYEATGRLRSHINPTGTVLLQLENTMQTSLKDLL

SEQ ID NO: 199 - DNA, 1197 bp, Artificial Sequence
  variant of human alpha-galactosidase A
ttggataacgggttagcccgtacacctccgatgggttggcttcactgggaaagattcatgtgtaacttagattgccaagaagagcctgacagctgtatctcagagaaactattcgaagagatggctgaacggatggtaaccgaaggatggaaggatgctggttatgaatacctatgtattgatgattgctggatggctccacagcgtgattcagaaggtaggttacaagctgacccccagagattcccacatggcatacgtcagcttgcaaaccatgtacacagcaaaggtctaaagttaggcatctacgctgatgtcggaaacaagacatgtgctggtttcccaggttcattcggttactatgacatagatgcgcagacgtttgctgattggggtgttgatttgttgaagtttgatggatgctactgcgattccctggagaacctagccgatgggtacaaacacatgagtttggctctaaacaggactggtaggccgatcgtctatagttgtgaatggcccttgtacatgtggccgtttcagaagccaaactacactgagataagacaatactgtaaccattggcgtaactttgctgacatagatgattcatgggcttcaatcaaatctatcttggattggacttctcgtaaccaggaaagaattgttgatgttgcaggtccaggtggatggaatgaccctgatatgcttgtcatagggaactttgggctatcatgggaccaacaagttacacaaatggctttgtgggcgatcatggccggccccctattcatgtctaatgatctacgtgcgatatcaccccaagcaaaggctttacttcaagataaggatgtcatagcgatcaaccaagatcctcttggtaaacaaggttatcaattgagaaaaggtgacaactttgaagtgtgggaaagaccattgtctggagacgcgtgggctgttgctattatcaaccgtcaagagatcggagggccaagatcttacactatcccggtagcctctttgggtaagggtgttgcgtgcaatcctgcctgcttcattacacaattgcttccagttaagagaaaattgggtttctatgaagcaacctctaggctaagaagtcacattaatcctactggtacggtattgttgcaattggagaacacaatgcaaacctctttgaaagatttgtcttaa

SEQ ID NO: 200 - protein, 398 aa, Artificial Sequence
  variant of human alpha-galactosidase A
LDNGLARTPPMGWLHWERFMCNLDCQEEPDSCISEKLFEEMAERMVTEGWKDAGYEYLCIDDCWMAPQRDSEGRLQADPQRFPHGIRQLANHVHSKGLKLGIYADVGNKTCAGFPGSFGYYDIDAQTFADWGVDLLKFDGCYCDSLENLADGYKHMSLALNRTGRPIVYSCEWPLYMWPFQKPNYTEIRQYCNHWRNFADIDDSWASIKSILDWTSRNQERIVDVAGPGGWNDPDMLVIGNFGLSWDQQVTQMALWAIMAGPLFMSNDLRAISPQAKALLQDKDVIAINQDPLGKQGYQLRKGDNFEVWERPLSGDAWAVAIINRQEIGGPRSYTIPVASLGKGVACNPACFITQLLPVKRKLGFYEATSRLRSHINPTGTVLLQLENTMQTSLKDLS

SEQ ID NO: 201 - DNA, 1197 bp, Artificial Sequence
  variant of human alpha-galactosidase A
ttggataacgggttagcccgtacacctccgatgggttggcttcactgggaaagattcatgtgtaacttagattgccaagaagagcctgacagctgtatctcagagaaactattcgaagagatggctgaacggatggtaaccgaaggatggaaggatgctggttatgaatacctatgtattgatgattgctggatggctccacagcgtgattcagaaggtaggttacaagctgacccccagagattcccacatggcatacgtcagcttgcaaaccatgtacacagcaaaggtctaaagttaggcatctacgctgatgtcggaaacaagacatgtgctggtttcccaggttcattcggttactatgacatagatgcgcagacgtttgctgattggggtgttgatttgttgaagtttgatggatgctactgcgattccctggagaacctagccgatgggtacaaacacatgagtttggctctaaacaggactggtaggccgatcgtctatagttgtgaatggcccttgtacatgtggccgtttcagaagccaaactacactgagataagacaatactgtaaccattggcgtaactttgctgacatagatgattcatgggcttcaatcaaatctatcttggattggacttctcgtaaccaggaaagaattgttgatgttgcaggtccaggtggatggaatgaccctgatatgcttgtcatagggaactttgggctatcatgggaccaacaagttacacaaatggctttgtgggcgatcatggccggccccctattcatgtctaatgatctacgtgcgatatcaccccaagcaaaggctttacttcaagataaggatgtcatagcgatcaaccaagatcctcttggtaaacaaggttatcaattgagaaaaggtgacaactttgaagtgtgggaaagaccattgtctggagacgcgtgggctgttgctattatcaaccgtcaagagatcggagggccaagatcttacactatcccggtagcctctttgggtaagggtgttgcgtgcaatcctgcctgcttcattacacaattgcttccagttaagagaaaattgggtttctatgaagcaacctctaggctaagaagtcacattaatcctactggtacggtattgttgcaattggagaacacaatgcaaacctctttgaaagatgctttataa

SEQ ID NO: 202 - protein, 398 aa, Artificial Sequence
  variant of human alpha-galactosidase A
LDNGLARTPPMGWLHWERFMCNLDCQEEPDSCISEKLFEEMAERMVTEGWKDAGYEYLCIDDCWMAPQRDSEGRLQADPQRFPHGIRQLANHVHSKGLKLGIYADVGNKTCAGFPGSFGYYDIDAQTFADWGVDLLKFDGCYCDSLENLADGYKHMSLALNRTGRPIVYSCEWPLYMWPFQKPNYTEIRQYCNHWRNFADIDDSWASIKSILDWTSRNQERIVDVAGPGGWNDPDMLVIGNFGLSWDQQVTQMALWAIMAGPLFMSNDLRAISPQAKALLQDKDVIAINQDPLGKQGYQLRKGDNFEVWERPLSGDAWAVAIINRQEIGGPRSYTIPVASLGKGVACNPACFITQLLPVKRKLGFYEATSRLRSHINPTGTVLLQLENTMQTSLKDAL

SEQ ID NO: 203 - DNA, 1197 bp, Artificial Sequence
  variant of human alpha-galactosidase A
ttggataacgggttagcccgtacacctccgatgggttggcttcactgggaaagattcatgtgtaacttagattgccaagaagagcctgacagctgtatctcagagaaactattcgaagagatggctgaacggatggtaaccgaaggatggaaggatgctggttatgaatacctatgtattgatgattgctggatggctccacagcgtgattcagaaggtaggttacaagctgacccccagagattcccacatggcatacgtcagcttgcaaaccatgtacacagcaaaggtctaaagttaggcatctacgctgatgtcggaaacaagacatgtgctggtttcccaggttcattcggttactatgacatagatgcgcagacgtttgctgattggggtgttgatttgttgaagtttgatggatgctactgcgattccctggagaacctagccgatgggtacaaacacatgagtttggctctaaacaggactggtaggccgatcgtctatagttgtgaatggcccttgtacatgtggccgtttcagaagccaaactacactgagataagacaatactgtaaccattggcgtaactttgctgacatagatgattcatggaagtcaatcaaatctatcttggattggacttctcgtaaccaggaaagaattgttgatgttgcaggtccaggtggatggaatgaccctgatatgcttgtcatagggaactttgggctatcatgggaccaacaagttacacaaatggctttgtgggcgatcatggccggccccctattcatgtctaatgatctacgtgcgatatcaccccaagcaaaggctttacttcaagataaggatgtcatagcgatcaaccaagatcctcttggtaaacaaggttatcaattgagaaaaggtgacaactttgaagtgtgggaaagaccattgtctggagacgcgtgggctgttgctattatcaaccgtcaagagatcggagggccaagatcttacactatcccggtagcctctttgggtaagggtgttgcgtgcaatcctgcctgcttcattacacaattgcttccagttaagagaaaattgggtttctatgaagcaacctctaggctaagaagtcacattaatcctactggtacggtattgttgcaattggagaacacaatgcaaacctctttgaaagatttgttataa

SEQ ID NO: 204 - protein, 398 aa, Artificial Sequence
  variant of human alpha-galactosidase A
LDNGLARTPPMGWLHWERFMCNLDCQEEPDSCISEKLFEEMAERMVTEGWKDAGYEYLCIDDCWMAPQRDSEGRLQADPQRFPHGIRQLANHVHSKGLKLGIYADVGNKTCAGFPGSFGYYDIDAQTFADWGVDLLKFDGCYCDSLENLADGYKHMSLALNRTGRPIVYSCEWPLYMWPFQKPNYTEIRQYCNHWRNFADIDDSWKSIKSILDWTSRNQERIVDVAGPGGWNDPDMLVIGNFGLSWDQQVTQMALWAIMAGPLFMSNDLRAISPQAKALLQDKDVIAINQDPLGKQGYQLRKGDNFEVWERPLSGDAWAVAIINRQEIGGPRSYTIPVASLGKGVACNPACFITQLLPVKRKLGFYEATSRLRSHINPTGTVLLQLENTMQTSLKDLL

SEQ ID NO: 205 - DNA, 1197 bp, Artificial Sequence
  variant of human alpha-galactosidase A
ttggataacgggttagcccgtacacctccgatgggttggcttcactgggaaagattcatgtgtaacttagattgccaagaagagcctgacagctgtatctcagagaaactattcgaagagatggctgaacggatggtaaccgaaggatggaaggatgctggttatgaatacctatgtattgatgattgctggatggctccacagcgtgattcagaaggtaggttacaagctgacccccagagattcccacatggcatacgtcagcttgcaaaccatgtacacagcaaaggtctaaagttaggcatctacgctgatgtcggaaacaagacatgtgctggtttcccaggttcattcggttactatgacatagatgcgcagacgtttgctgattggggtgttgatttgttgaagtttgatggatgctactgcgattccctggagaacctagccgatgggtacaaacacatgagtttggctctaaacaggactggtaggaagatcgtctatagttgtgaatggcccttgtacatgtggccgtttcagaagccaaactacactgagataagacaatactgtaaccattggcgtaactttgctgacatagatgattcatgggcttcaatcaaatctatcttggattggacttctcgtaaccaggaaagaattgttgatgttgcaggtccaggtggatggaatgaccctgatatgcttgtcatagggaactttgggctatcatgggaccaacaagttacacaaatggctttgtgggcgatcatggccggccccctattcatgtctaatgatctacgtgcgatatcaccccaagcaaaggctttacttcaagataaggatgtcatagcgatcaaccaagatcctcttggtaaacaaggttatcaattgagaaaaggtgacaactttgaagtgtgggaaagaccattgtctggagacgcgtgggctgttgctattatcaaccgtcaagagatcggagggccaagatcttacactatcccggtagcctctttgggtaagggtgttgcgtgcaatcctgcctgcttcattacacaattgcttccagttaagagaaaattgggtttctatgaagcaacctctaggctaagaagtcacattaatcctactggtacggtattgttgcaattggagaacacaatgcaaacctctttgaaagatttgttataa

SEQ ID NO: 206 - protein, 398 aa, Artificial Sequence
  variant of human alpha-galactosidase A
LDNGLARTPPMGWLHWERFMCNLDCQEEPDSCISEKLFEEMAERMVTEGWKDAGYEYLCIDDCWMAPQRDSEGRLQADPQRFPHGIRQLANHVHSKGLKLGIYADVGNKTCAGFPGSFGYYDIDAQTFADWGVDLLKFDGCYCDSLENLADGYKHMSLALNRTGRKIVYSCEWPLYMWPFQKPNYTEIRQYCNHWRNFADIDDSWASIKSILDWTSRNQERIVDVAGPGGWNDPDMLVIGNFGLSWDQQVTQMALWAIMAGPLFMSNDLRAISPQAKALLQDKDVIAINQDPLGKQGYQLRKGDNFEVWERPLSGDAWAVAIINRQEIGGPRSYTIPVASLGKGVACNPACFITQLLPVKRKLGFYEATSRLRSHINPTGTVLLQLENTMQTSLKDLL

SEQ ID NO: 207 - DNA, 1197 bp, Artificial Sequence
  variant of human alpha-galactosidase A
ttggataacgggttagcccgtacacctccgatgggttggcttcactgggaaagattcatgtgtaacttagattgccaagaagagcctgacagctgtatctcagagaaactattcgaagagatggctgaacggatggtaaccgaaggatggaaggatgctggttatgaatacctatgtattgatgattgctggatggctccacagcgtgattcagaaggtaggttacaagctgacccccagagattcccacatggcatacgtcagcttgcaaaccatgtacacagcaaaggtctaaagttaggcatctacgctgatgtcggaaacaagacatgtgctggtttcccaggttcattcggttactatgacatagatgcgcagacgtttgctgattggggtgttgatttgttgaagtttgatggatgctactgcgattccctggagaacctagccgatgggtacaaacacatgagtttggctctaaacaggactggtaggccgatcgtctatagttgtgaatggcccttgtacatgtggccgtttcagaagccaaactacactgagataagacaatactgtaaccattggcgtaactttgctgacatagatgattcatgggcttcaatcaaatctatcttggattggacttctcgtaaccaggaaagaattgttgatgttgcaggtccaggtggatggaatgaccctgatatgcttgtcatagggaactttgggctatcatgggaccaacaagttacacaaatggctttgtgggcgatcatggccggccccctattcatgtctaatgatctacgtaggatatcaccccaagcaaaggctttacttcaagataaggatgtcatagcgatcaaccaagatcctcttggtaaacaaggttatcaattgagaaaaggtgacaactttgaagtgtgggaaagaccattgtctggagacgcgtgggctgttgctattatcaaccgtcaagagatcggagggccaagatcttacactatcccggtagcctctttgggtaagggtgttgcgtgcaatcctgcctgcttcattacacaattgcttccagttaagagaaaattgggtttctatgaagcaacctctaggctaagaagtcacattaatcctactggtacggtattgttgcaattggagaacacaatgcaaacctctttgaaagatttgttataa

SEQ ID NO: 208 - protein, 398 aa, Artificial Sequence
  variant of human alpha-galactosidase A
LDNGLARTPPMGWLHWERFMCNLDCQEEPDSCISEKLFEEMAERMVTEGWKDAGYEYLCIDDCWMAPQRDSEGRLQADPQRFPHGIRQLANHVHSKGLKLGIYADVGNKTCAGFPGSFGYYDIDAQTFADWGVDLLKFDGCYCDSLENLADGYKHMSLALNRTGRPIVYSCEWPLYMWPFQKPNYTEIRQYCNHWRNFADIDDSWASIKSILDWTSRNQERIVDVAGPGGWNDPDMLVIGNFGLSWDQQVTQMALWAIMAGPLFMSNDLRRISPQAKALLQDKDVIAINQDPLGKQGYQLRKGDNFEVWERPLSGDAWAVAIINRQEIGGPRSYTIPVASLGKGVACNPACFITQLLPVKRKLGFYEATSRLRSHINPTGTVLLQLENTMQTSLKDLL

SEQ ID NO: 209 - DNA, 1197 bp, Artificial Sequence
  variant of human alpha-galactosidase A
ttggataacgggttagcccgtacacctccgatgggttggcttcactgggaaagattcatgtgtaacttagattgccaagaagagcctgacagctgtatctcagagaaactattcgaagagatggctgaacggatggtaaccgaaggatggaaggatgctggttatgaatacctatgtattgatgattgctggatggctccacagcgtgattcagaaggtaggttacaagctgacccccagagattcccacatggcatacgtcagcttgcaaaccatgtacacagcaaaggtctaaagttaggcatctacgctgatgtcggaaacaagacatgtgctggtttcccaggttcattcggttactatgacatagatgcgcagacgtttgctgattggggtgttgatttgttgaagtttgatggatgctactgcgattccctggagaacctagccgatgggtacaaacacatgagtttggctctaaacaggactggtaggccgatcgtctatagttgtgaatggcccttgtacatgtggccgtttcagaagccaaactacactgagataagacaatactgtaaccattggcgtaactttgctgacatagatgattcatgggcttcaatcaaatctatcttggattggacttctcgtaaccaggaaagaattgttgatgttgcaggtccaggtggatggaatgaccctgatatgcttgtcatagggaactttgggctatcatgggaccaacaagttacacaaatggctttgtgggcgatcatggccggccccctattcatgtctaatgatctacgtgcgatatcaccccaagcaaaggctttacttcaagataaggatgtcatagcgatcaaccaagatcctcttggtaaacaaggttatcaattgagaaaaggtgacaactttgaagtgtgggaaagaccattgtctggagacgcgtgggctgttgctattatcaaccgtcaagagatcggagggccaagatcttacactatcccggtagcctctttgggtaagggtgttgcgtgcaatcctgcctgcttcattacacaattgcttccagttaagagaaaattgggtttctatgaagcaacctctaggctaagaagtcacattaatcctactggtacggtattgttgcaattggagaacacaatgcaaacctctttgaaaggtttaactcga

SEQ ID NO: 210 - protein, 399 aa, Artificial Sequence
  variant of human alpha-galactosidase A
LDNGLARTPPMGWLHWERFMCNLDCQEEPDSCISEKLFEEMAERMVTEGWKDAGYEYLCIDDCWMAPQRDSEGRLQADPQRFPHGIRQLANHVHSKGLKLGIYADVGNKTCAGFPGSFGYYDIDAQTFADWGVDLLKFDGCYCDSLENLADGYKHMSLALNRTGRPIVYSCEWPLYMWPFQKPNYTEIRQYCNHWRNFADIDDSWASIKSILDWTSRNQERIVDVAGPGGWNDPDMLVIGNFGLSWDQQVTQMALWAIMAGPLFMSNDLRAISPQAKALLQDKDVIAINQDPLGKQGYQLRKGDNFEVWERPLSGDAWAVAIINRQEIGGPRSYTIPVASLGKGVACNPACFITQLLPVKRKLGFYEATSRLRSHINPTGTVLLQLENTMQTSLKGLTR

SEQ ID NO: 211 - DNA, 1197 bp, Artificial Sequence
  variant of human alpha-galactosidase A
ttggataacgggttagcccgtacacctccgatgggttggcttcactgggaaagattcatgtgtaacttagattgccaagaagagcctgacagctgtatctcagagaaactattcgaagagatggctgaacggatggtaaccgaaggatggaaggatgctggttatgaatacctatgtattgatgattgctggatggctccacagcgtgattcagaaggtaggttacaagctgacccccagagattcccacatggcatacgtcagcttgcaaaccatgtacacagcaaaggtctaaagttaggcatctacgctgatgtcggaaacaagacatgtgctggtttcccaggttcattcggttactatgacatagatgcgcagacgtttgctgattggggtgttgatttgttgaagtttgatggatgctactgcgattccctggagaacctagccgatgggtacaaacacatgagtttggctctaaacaggactggtaggccgatcgtctatagttgtgaatggcccttgtacatgagtccgtttcagaagccaaactacactgagataagacaatactgtaaccattggcgtaactttgctgacatagatgattcatgggcttcaatcaaatctatcttggattggacttctcgtaaccaggaaagaattgttgatgttgcaggtccaggtggatggaatgaccctgatatgcttgtcatagggaactttgggctatcatgggaccaacaagttacacaaatggctttgtgggcgatcatggccggccccctattcatgtctaatgatctacgtgcgatatcaccccaagcaaaggctttacttcaagataaggatgtcatagcgatcaaccaagatcctcttggtaaacaaggttatcaattgagaaaaggtgacaactttgaagtgtgggaaagaccattgtctggagacgcgtgggctgttgctattatcaaccgtcaagagatcggagggccaagatcttacactatcccggtagcctctttgggtaagggtgttgcgtgcaatcctgcctgcttcattacacaattgcttccagttaagagaaaattgggtttctatgaagcaacctctaggctaagaagtcacattaatcctactggtacggtattgttgcaattggagaacacaatgcaaacctctttgaaagatttgttataa

SEQ ID NO: 212 - protein, 398 aa, Artificial Sequence
  variant of human alpha-galactosidase A
LDNGLARTPPMGWLHWERFMCNLDCQEEPDSCISEKLFEEMAERMVTEGWKDAGYEYLCIDDCWMAPQRDSEGRLQADPQRFPHGIRQLANHVHSKGLKLGIYADVGNKTCAGFPGSFGYYDIDAQTFADWGVDLLKFDGCYCDSLENLADGYKHMSLALNRTGRPIVYSCEWPLYMSPFQKPNYTEIRQYCNHWRNFADIDDSWASIKSILDWTSRNQERIVDVAGPGGWNDPDMLVIGNFGLSWDQQVTQMALWAIMAGPLFMSNDLRAISPQAKALLQDKDVIAINQDPLGKQGYQLRKGDNFEVWERPLSGDAWAVAIINRQEIGGPRSYTIPVASLGKGVACNPACFITQLLPVKRKLGFYEATSRLRSHINPTGTVLLQLENTMQTSLKDLL

SEQ ID NO: 213 - DNA, 1197 bp, Artificial Sequence
  variant of human alpha-galactosidase A
ttggataacgggttagcccgtacacctccgatgggttggcttcactgggaaagattcatgtgtaacttagattgccaagaagagcctgacagctgtatctcagagaaactattcgaagagatggctgaacggatggtaaccgaaggatggaaggatgctggttatgaatacctatgtattgatgattgctggatggctccacagcgtgattcagaaggtaggttacaagctgacccccagagattcccacatggcatacgtcagcttgcaaaccatgtacacagcaaaggtctaaagttaggcatctacgctgatgtcggaaacaagacatgtgctggtttcccaggttcattcggttactatgacatagatgcgcagacgtttgctgattggggtgttgatttgttgaagtttgatggatgctactgcgattccctggagaacctagccgatgggtacaaacacatgagtttggctctaaacaggactggtaggccgatcgtctatagttgtgaatggcccttgtacatgtggccgtttcagaagccaaactacactgagataagacaatactgtaaccattggcgtaactttgctgacatagatgattcatgggcttcaatcaaatctatcttggattggacttctcgtaaccaggaaagaattgttgatgttgcaggtccaggtggatggaatgaccctgatatgcttgtcatagggaactttgggctatcatgggaccaacaagttacacaaatggctttgtgggcgatcatggccggccccctattcatgtctaatgatctacgtgcgatatcaccccaagcaaaggctttacttcaagataaggatgtcatagcgatcaaccaagatcctcttggtaaacaaggttatcaattgagaaaaggtgacaactttgaagtgtgggaaagaccattggcgggagacgcgtgggctgttgctattatcaaccgtcaagagatcggagggccaagatcttacactatcccggtagcctctttgggtaagggtgttgcgtgcaatcctgcctgcttcattacacaattgcttccagttaagagaaaattgggtttctatgaagcaacctctaggctaagaagtcacattaatcctactggtacggtattgttgcaattggagaacacaatgcaaacctctttgaaagatttgttataa

SEQ ID NO: 214 - protein, 398 aa, Artificial Sequence
  variant of human alpha-galactosidase A
LDNGLARTPPMGWLHWERFMCNLDCQEEPDSCISEKLFEEMAERMVTEGWKDAGYEYLCIDDCWMAPQRDSEGRLQADPQRFPHGIRQLANHVHSKGLKLGIYADVGNKTCAGFPGSFGYYDIDAQTFADWGVDLLKFDGCYCDSLENLADGYKHMSLALNRTGRPIVYSCEWPLYMWPFQKPNYTEIRQYCNHWRNFADIDDSWASIKSILDWTSRNQERIVDVAGPGGWNDPDMLVIGNFGLSWDQQVTQMALWAIMAGPLFMSNDLRAISPQAKALLQDKDVIAINQDPLGKQGYQLRKGDNFEVWERPLAGDAWAVAIINRQEIGGPRSYTIPVASLGKGVACNPACFITQLLPVKRKLGFYEATSRLRSHINPTGTVLLQLENTMQTSLKDLL

SEQ ID NO: 215 - DNA, 1197 bp, Artificial Sequence
  variant of human alpha-galactosidase A
ttggataacgggttagcccgtacacctccgatgggttggcttcactgggaaagattcatgtgtaacttagattgccaagaagagcctgacagctgtatctcagagaaactattcgaagagatggctgaacggatggtaaccgaaggatggaaggatgctggttatgaatacctatgtattgatgattgctggatggctccacagcgtgatccggaaggtaggttacaagctgacccccagagattcccacatggcatacgtcagcttgcaaaccatgtacacagcaaaggtctaaagttaggcatctacgctgatgtcggaaacaagacatgtgctggtttcccaggttcattcggttactatgacatagatgcgcagacgtttgctgattggggtgttgatttgttgaagtttgatggatgctactgcgattccctggagaacctagccgatgggtacaaacacatgagtttggctctaaacaggactggtaggccgatcgtctatagttgtgaatggcccttgtacatgtggccgtttcagaagccaaactacactgagataagacaatactgtaaccattggcgtaactttgctgacatagatgattcatgggcttcaatcaaatctatcttggattggacttctcgtaaccaggaaagaattgttgatgttgcaggtccaggtggatggaatgaccctgatatgcttgtcatagggaactttgggctatcatgggaccaacaagttacacaaatggctttgtgggcgatcatggccggccccctattcatgtctaatgatctacgtgcgatatcaccccaagcaaaggctttacttcaagataaggatgtcatagcgatcaaccaagatcctcttggtaaacaaggttatcaattgagaaaaggtgacaactttgaagtgtgggaaagaccattgtctggagacgcgtgggctgttgctattatcaaccgtcaagagatcggagggccaagatcttacactatcccggtagcctctttgggtaagggtgttgcgtgcaatcctgcctgcttcattacacaattgcttccagttaagagaaaattgggtttctatgaagcaacctctaggctaagaagtcacattaatcctactggtacggtattgttgcaattggagaacacaatgcaaacctctttgaaagatttgttataa

SEQ ID NO: 216 - protein, 398 aa, Artificial Sequence
  variant of human alpha-galactosidase A
LDNGLARTPPMGWLHWERFMCNLDCQEEPDSCISEKLFEEMAERMVTEGWKDAGYEYLCIDDCWMAPQRDPEGRLQADPQRFPHGIRQLANHVHSKGLKLGIYADVGNKTCAGFPGSFGYYDIDAQTFADWGVDLLKFDGCYCDSLENLADGYKHMSLALNRTGRPIVYSCEWPLYMWPFQKPNYTEIRQYCNHWRNFADIDDSWASIKSILDWTSRNQERIVDVAGPGGWNDPDMLVIGNFGLSWDQQVTQMALWAIMAGPLFMSNDLRAISPQAKALLQDKDVIAINQDPLGKQGYQLRKGDNFEVWERPLSGDAWAVAIINRQEIGGPRSYTIPVASLGKGVACNPACFITQLLPVKRKLGFYEATSRLRSHINPTGTVLLQLENTMQTSLKDLL

SEQ ID NO: 217 - DNA, 1197 bp, Artificial Sequence
  variant of human alpha-galactosidase A
ttggataacgggttagcccgtacacctccgatgggttggcttcactgggaaagattcatgtgtaacttagattgccaagaagagcctgacagctgtatctcagagaaactattcgaagagatggctgaacggatggtaaccgaaggatggaaggatgctggttatgaatacctatgtattgatgattgctggatggctccacagcgtgattcagaaggtaggttacaagctgacccccagagattcccacatggcatacgtcagcttgcaaaccatgtacacagcaaaggtctaaagttaggcatctacgctgatgtcggaaacaagacatgtgctggtttcccaggttcattcggttactatgacatagatgcgcagacgtttgctgattggggtgttgatttgttgaagtttgatggatgctactgcgattccctggagaacctagccgatgggtacaaacacatgagtttggctctaaacaggactggtaggccgatcgtctatagttgtgaatggcccttgtacatgtggccgtttcagaagccaaactacactgagataagacaatactgtaaccattggcgtaactttgctgacatagatgattcatgggcttcaatcaaatctatcttggattggacttctcgtaaccaggaaagaattgttgatgttgcaggtccaggtggatggaatgaccctgatatgcttgtcatagggaactttgggctatcatgggaccaacaagttacacaaatggctttgtgggcgatcatggccggccccctattcatgtctaatgatctacgtgcgatatcaccccaagcaaaggctttacttcaagataaggatgtcatagcgatcaaccaagatcctcttggtaaacaaggttatcaattgagaaaaggtgacaactttgaagtgtgggaaagaccattgtctggagacgcgtgggctgttgctattatcaaccgtcaagagatcggagggccaagatcttacactatcccggtagcctctttgggtaagggtgttgcgtgcaatcctgcctgcttcattacacaattgcttccagttaagagaaaattgggtttctatgaagcaacctctaggctaagaagtcacattaatcctactggtacggtattgttgcaattggagaacacaatgcaaacctctaagaaagatttgttataa

SEQ ID NO: 218 - protein, 398 aa, Artificial Sequence
  variant of human alpha-galactosidase A
LDNGLARTPPMGWLHWERFMCNLDCQEEPDSCISEKLFEEMAERMVTEGWKDAGYEYLCIDDCWMAPQRDSEGRLQADPQRFPHGIRQLANHVHSKGLKLGIYADVGNKTCAGFPGSFGYYDIDAQTFADWGVDLLKFDGCYCDSLENLADGYKHMSLALNRTGRPIVYSCEWPLYMWPFQKPNYTEIRQYCNHWRNFADIDDSWASIKSILDWTSRNQERIVDVAGPGGWNDPDMLVIGNFGLSWDQQVTQMALWAIMAGPLFMSNDLRAISPQAKALLQDKDVIAINQDPLGKQGYQLRKGDNFEVWERPLSGDAWAVAIINRQEIGGPRSYTIPVASLGKGVACNPACFITQLLPVKRKLGFYEATSRLRSHINPTGTVLLQLENTMQTSKKDLL

SEQ ID NO: 219 - DNA, 1197 bp, Artificial Sequence
  variant of human alpha-galactosidase A
ttggataacgggttagcccgtacacctccgatgggttggcttcactgggaaagattcatgtgtaacttagattgccaagaagagcctgacagctgtatctcagagaaactattcgaagagatggctgaacggatggtaaccgaaggatggaaggatgctggttatgaatacctatgtattgatgattgctggatggctccacagcgtgattcagaaggtaggttacaagctgacccccagagattcccacatggcatacgtcagcttgcaaaccatgtacacagcaaaggtctaaagttaggcatctacgctgatgtcggaaacaagacatgtgctggtttcccaggttcattcggttactatgacatagatgcgcagacgtttgctgattggggtgttgatttgttgaagtttgatggatgctactgcgattccctggagaacctagccgatgggtacaaacacatgagtttggctctaaacaggactggtaggccgatcgtctatagttgtgaatggcccttgtacatgtggccgtttgctaagccaaactacactgagataagacaatactgtaaccattggcgtaactttgctgacatagatgattcatgggcttcaatcaaatctatcttggattggacttctcgtaaccaggaaagaattgttgatgttgcaggtccaggtggatggaatgaccctgatatgcttgtcatagggaactttgggctatcatgggaccaacaagttacacaaatggctttgtgggcgatcatggccggccccctattcatgtctaatgatctacgtgcgatatcaccccaagcaaaggctttacttcaagataaggatgtcatagcgatcaaccaagatcctcttggtaaacaaggttatcaattgagaaaaggtgacaactttgaagtgtgggaaagaccattgtctggagacgcgtgggctgttgctattatcaaccgtcaagagatcggagggccaagatcttacactatcccggtagcctctttgggtaagggtgttgcgtgcaatcctgcctgcttcattacacaattgcttccagttaagagaaaattgggtttctatgaagcaacctctaggctaagaagtcacattaatcctactggtacggtattgttgcaattggagaacacaatgcaaacctctttgaaagatttgttataa

SEQ ID NO: 220 - protein, 398 aa, Artificial Sequence
  variant of human alpha-galactosidase A
LDNGLARTPPMGWLHWERFMCNLDCQEEPDSCISEKLFEEMAERMVTEGWKDAGYEYLCIDDCWMAPQRDSEGRLQADPQRFPHGIRQLANHVHSKGLKLGIYADVGNKTCAGFPGSFGYYDIDAQTFADWGVDLLKFDGCYCDSLENLADGYKHMSLALNRTGRPIVYSCEWPLYMWPFAKPNYTEIRQYCNHWRNFADIDDSWASIKSILDWTSRNQERIVDVAGPGGWNDPDMLVIGNFGLSWDQQVTQMALWAIMAGPLFMSNDLRAISPQAKALLQDKDVIAINQDPLGKQGYQLRKGDNFEVWERPLSGDAWAVAIINRQEIGGPRSYTIPVASLGKGVACNPACFITQLLPVKRKLGFYEATSRLRSHINPTGTVLLQLENTMQTSLKDLL

SEQ ID NO: 221 - DNA, 1197 bp, Artificial Sequence
  variant of human alpha-galactosidase A
ttggataacgggttagcccgtacacctccgatgggttggcttcactgggaaagattcatgtgtaacttagattgccaagaagagcctgacagctgtatctcagagaaactattcgaagagatggctgaacggatggtaaccgaaggatggaaggatgctggttatgaatacctatgtattgatgattgctggatggctccacagcgtgattcagaaggtaggttacaagctgacccccagagattcccacatggcatacgtcagcttgcaaaccatgtacacagcaaaggtctaaagttaggcatctacgctgatgtcggaaacaagacatgtgctggtttcccaggttcattcggttactatgacatagatgcgcagacgtttgctgattggggtgttgatttgttgaagtttgatggatgctactgcgattccctggagaacctagccgatgggtacaaacacatgagtttggctctaaacaggactggtaggccgatcgtctatagttgtgaatggcccttgtacatgtggccgtttcagaagccaaactacactgagataagacaatactgtaaccattggcgtaactttgctgacatagatgattcatgggcttcaatcaaatctatcttggattggacttctcgtaaccaggaaagaattgttgatgttgcaggtccaggtggatggaatgaccctgatatgcttgtcatagggaactttgggctatcatgggaccaacaagttacacaaatggctttgtgggcgatcatggccggccccctattcatgtctaatgatctacgtgcgatatcaccccaagcaaaggctttacttcaagataaggatgtcatagcgatcaaccaagatcctcttggtaaacaaggttatcaattgagaaaaggtgacaactttgaagtgtgggaaagaccattgtctggagacgcgtgggctgttgctattatcaaccgtcaagagatcggagggccaagatcttacactatcccggtagcctctttgggtaagggtgcggcgtgcaatcctgcctgcttcattacacaattgcttccagttaagagaaaattgggtttctatgaagcaacctctaggctaagaagtcacattaatcctactggtacggtattgttgcaattggagaacacaatgcaaacctctttgaaagatttgttataa

SEQ ID NO: 222 - protein, 398 aa, Artificial Sequence
  variant of human alpha-galactosidase A
LDNGLARTPPMGWLHWERFMCNLDCQEEPDSCISEKLFEEMAERMVTEGWKDAGYEYLCIDDCWMAPQRDSEGRLQADPQRFPHGIRQLANHVHSKGLKLGIYADVGNKTCAGFPGSFGYYDIDAQTFADWGVDLLKFDGCYCDSLENLADGYKHMSLALNRTGRPIVYSCEWPLYMWPFQKPNYTEIRQYCNHWRNFADIDDSWASIKSILDWTSRNQERIVDVAGPGGWNDPDMLVIGNFGLSWDQQVTQMALWAIMAGPLFMSNDLRAISPQAKALLQDKDVIAINQDPLGKQGYQLRKGDNFEVWERPLSGDAWAVAIINRQEIGGPRSYTIPVASLGKGAACNPACFITQLLPVKRKLGFYEATSRLRSHINPTGTVLLQLENTMQTSLKDLL

SEQ ID NO: 223 - DNA, 1197 bp, Artificial Sequence
  variant of human alpha-galactosidase A
ttggataacgggttagcccgtacacctccgatgggttggcttcactgggaaagattcatgtgtaacttagattgccaagaagagcctgacagctgtatctcagagaaactattcgaagagatggctgaacggatggtaaccgaaggatggaaggatgctggttatgaatacctatgtattgatgattgctggatggctccacagcgtgattcagaaggtaggttacaagctgacccccagagattcccacatggcatacgtcagcttgcaaaccatattcacagcaaaggtctaaagttaggcatctacgctgatgtcggaaacaagacatgtgctggtttcccaggttcattcggttactatgacatagatgcgcagacgtttgctgattggggtgttgatttgttgaagtttgatggatgctactgcgattccctggagaacctagccgatgggtacaaacacatgagtttggctctaaacaggactggtaggccgatcgtctatagttgtgaatggcccttgtacatgtggccgtttcagaagccaaactacactgagataagacaatactgtaaccattggcgtaactttgctgacatagatgattcatgggcttcaatcaaatctatcttggattggacttctcgtaaccaggaaagaattgttgatgttgcaggtccaggtggatggaatgaccctgatatgcttgtcatagggaactttgggctatcatgggaccaacaagttacacaaatggctttgtgggcgatcatggccggccccctattcatgtctaatgatctacgtgcgatatcaccccaagcaaaggctttacttcaagataaggatgtcatagcgatcaaccaagatcctcttggtaaacaaggttatcaattgagaaaaggtgacaactttgaagtgtgggaaagaccattgtctggagacgcgtgggctgttgctattatcaaccgtcaagagatcggagggccaagatcttacactatcccggtagcctctttgggtaagggtgttgcgtgcaatcctgcctgcttcattacacaattgcttccagttaagagaaaattgggtttctatgaagcaacctctaggctaagaagtcacattaatcctactggtacggtattgttgcaattggagaacacaatgcaaacctctttgaaagatttgttataa

SEQ ID NO: 224 - protein, 398 aa, Artificial Sequence
  variant of human alpha-galactosidase A
LDNGLARTPPMGWLHWERFMCNLDCQEEPDSCISEKLFEEMAERMVTEGWKDAGYEYLCIDDCWMAPQRDSEGRLQADPQRFPHGIRQLANHIHSKGLKLGIYADVGNKTCAGFPGSFGYYDIDAQTFADWGVDLLKFDGCYCDSLENLADGYKHMSLALNRTGRPIVYSCEWPLYMWPFQKPNYTEIRQYCNHWRNFADIDDSWASIKSILDWTSRNQERIVDVAGPGGWNDPDMLVIGNFGLSWDQQVTQMALWAIMAGPLFMSNDLRAISPQAKALLQDKDVIAINQDPLGKQGYQLRKGDNFEVWERPLSGDAWAVAIINRQEIGGPRSYTIPVASLGKGVACNPACFITQLLPVKRKLGFYEATSRLRSHINPTGTVLLQLENTMQTSLKDLL

SEQ ID NO: 225 - DNA, 1197 bp, Artificial Sequence
  variant of human alpha-galactosidase A
ttggataacgggttagcccgtacacctccgatgggttggcttcactgggaaagattcatgtgtaacttagattgccaagaagagcctgacagctgtatctcagagaaactattcgaagagatggctgaacggatggtaaccgaaggatggaaggatgctggttatgaatacctatgtattgatgattgctggatggctccacagcgtgattcagaaggtaggttacaagctgacccccagagattcccacatggcatacgtcagcttgcaaaccatgtacacagcaaaggtctaaagttaggcatctacgctgatgtcggaaacaagacatgtgctggtttcccaggttcattcggttactatgacatagatgcgcagacgtttgctgattggggtgttgatttgttgaagtttgatggatgctactgcgattccctggagaacctagccgatgggtacaaacacatgagtttggctctaaacaggactggtaggccgatcgtctatagttgtgaatggcccttgtacatgtggccgtttcagaagccaaactacactgagataagacaatactgtaaccattggcgtaactttgctgacatagatgattcatgggcttcaatcaaatctatcttggattggacttctcgtaaccaggaaagaattgttgatgttgcaggtccaggtggatggaatgaccctgatatgcttgtcatagggaactttgggctatcatgggaccaacaagttacacaaatggctttgtgggcgatcatggccggccccctattcatgtctaatgatctacgtgcgatatcaccccaagcaaaggctttacttcaagataaggatgtcatagcgatcaaccaagatcctcttggtaaacaaggttatcaattgagaaaaggtgacaactttgaagtgtgggaaagaccattgtctggagacgcgtgggctgttgctattatcaaccgtcaagagatcggagggccaagatcttacactatcccggtagcctctttgggtaagggtgttgcgtgcaatcctgcctgcttcattacacaattgcttccagttaagagaaaattgggtcagtatgaagcaacctctaggctaagaagtcacattaatcctactggtacggtattgttgcaattggagaacacaatgcaaacctctttgaaagatttgttataa

SEQ ID NO: 226 - protein, 398 aa, Artificial Sequence
  variant of human alpha-galactosidase A
LDNGLARTPPMGWLHWERFMCNLDCQEEPDSCISEKLFEEMAERMVTEGWKDAGYEYLCIDDCWMAPQRDSEGRLQADPQRFPHGIRQLANHVHSKGLKLGIYADVGNKTCAGFPGSFGYYDIDAQTFADWGVDLLKFDGCYCDSLENLADGYKHMSLALNRTGRPIVYSCEWPLYMWPFQKPNYTEIRQYCNHWRNFADIDDSWASIKSILDWTSRNQERIVDVAGPGGWNDPDMLVIGNFGLSWDQQVTQMALWAIMAGPLFMSNDLRAISPQAKALLQDKDVIAINQDPLGKQGYQLRKGDNFEVWERPLSGDAWAVAIINRQEIGGPRSYTIPVASLGKGVACNPACFITQLLPVKRKLGQYEATSRLRSHINPTGTVLLQLENTMQTSLKDLL

SEQ ID NO: 227 - DNA, 1197 bp, Artificial Sequence
  variant of human alpha-galactosidase A
ttggataacgggttagcccgtacacctccgatgggttggcttcactgggaaagattcatgtgtaacttagattgccaagaagagcctgacagctgtatctcagagaaactattcgaagagatggctgaacggatggtaaccgaaggatggaaggatgctggttatgaatacctatgtattgatgattgctggatggctccacagcgtgattcagaaggtaggttacaagctgacccccagagattcccacatggcatacgtcagcttgcaaaccatgtacacagcaaaggtctaaagttaggcatctacgctgatgtcggaaacaagacatgtgctggtttcccaggttcattcggttactatgacatagatgcgcagacgtttgctgattggggtgttgatttgttgaagtttgatggatgctactgcgattccctggagaacctagccgatgggtacaaacacatgagtttggctctaaacaggactggtaggccgatcgtctatagttgtgaatggcccttgtacatgtggccgtttcagaagccaaactacactgagataagacaatactgtaaccattggcgtaactttgctgacatagatgattcatgggcttcaatcaaatctatcttggattggacttctcgtaaccaggaaagaattgttgatgttgcaggtccaggtggatggaatgaccctgatatgcttgtcatagggaactttgggctatcatgggaccaacaagttacacaaatggctttgtgggcgatcatggccggccccctattcatgtctaatgatctacgtgcgatatcaccccaagcaaaggctttacttcaagataaggatgtcatagcgatcaaccaagatcctcttggtaaacaaggttatcaattgagaaaaggtgacaactttgaagtgtgggaaagaccattgtctggagacgcgtgggctgttgctattatcaaccgtcaagagatcggagggccaagatcttacactgtgccggtagcctctttgggtaagggtgttgcgtgcaatcctgcctgcttcattacacaattgcttccagttaagagaaaattgggtttctatgaagcaacctctaggctaagaagtcacattaatcctactggtacggtattgttgcaattggagaacacaatgcaaacctctttgaaagatttgttataa

SEQ ID NO: 228 - protein, 398 aa, Artificial Sequence
  variant of human alpha-galactosidase A
LDNGLARTPPMGWLHWERFMCNLDCQEEPDSCISEKLFEEMAERMVTEGWKDAGYEYLCIDDCWMAPQRDSEGRLQADPQRFPHGIRQLANHVHSKGLKLGIYADVGNKTCAGFPGSFGYYDIDAQTFADWGVDLLKFDGCYCDSLENLADGYKHMSLALNRTGRPIVYSCEWPLYMWPFQKPNYTEIRQYCNHWRNFADIDDSWASIKSILDWTSRNQERIVDVAGPGGWNDPDMLVIGNFGLSWDQQVTQMALWAIMAGPLFMSNDLRAISPQAKALLQDKDVIAINQDPLGKQGYQLRKGDNFEVWERPLSGDAWAVAIINRQEIGGPRSYTVPVASLGKGVACNPACFITQLLPVKRKLGFYEATSRLRSHINPTGTVLLQLENTMQTSLKDLL

SEQ ID NO: 229 - DNA, 1197 bp, Artificial Sequence
  variant of human alpha-galactosidase A
ttggataacgggttagcccgtacacctccgatgggttggcttcactgggaaagattcatgtgtaacttagattgccaagaagagcctgacagctgtatctcagagaaactattcgaagagatggctgaacggatggtaaccgaaggatggaaggatgctggttatgaatacctatgtattgatgattgctggatggctccacagcgtgattcagaaggtaggttacaagctgacccccagagattcccacatggcatacgtcagcttgcaaactttgtacacagcaaaggtctaaagttaggcatctacgctgatgtcggaaacaagacatgtgctggtttcccaggttcattcggttactatgacatagatgcgcagacgtttgctgattggggtgttgatttgttgaagtttgatggatgctactgcgattccctggagaacctagccgatgggtacaaacacatgagtttggctctaaacaggactggtaggccgatcgtctatagttgtgaatggcccttgtacatgtggccgtttcagaagccaaactacactgagataagacaatactgtaaccattggcgtaactttgctgacatagatgattcatgggcttcaatcaaatctatcttggattggacttctcgtaaccaggaaagaattgttgatgttgcaggtccaggtggatggaatgaccctgatatgcttgtcatagggaactttgggctatcatgggaccaacaagttacacaaatggctttgtgggcgatcatggccggccccctattcatgtctaatgatctacgtgcgatatcaccccaagcaaaggctttacttcaagataaggatgtcatagcgatcaaccaagatcctcttggtaaacaaggttatcaattgagaaaaggtgacaactttgaagtgtgggaaagaccattgtctggagacgcgtgggctgttgctattatcaaccgtcaagagatcggagggccaagatcttacactatcccggtagcctctttgggtaagggtgttgcgtgcaatcctgcctgcttcattacacaattgcttccagttaagagaaaattgggtttctatgaagcaacctctaggctaagaagtcacattaatcctactggtacggtattgttgcaattggagaacacaatgcaaacctctttgaaagatttgttataa

SEQ ID NO: 230 - protein, 398 aa, Artificial Sequence
  variant of human alpha-galactosidase A
LDNGLARTPPMGWLHWERFMCNLDCQEEPDSCISEKLFEEMAERMVTEGWKDAGYEYLCIDDCWMAPQRDSEGRLQADPQRFPHGIRQLANFVHSKGLKLGIYADVGNKTCAGFPGSFGYYDIDAQTFADWGVDLLKFDGCYCDSLENLADGYKHMSLALNRTGRPIVYSCEWPLYMWPFQKPNYTEIRQYCNHWRNFADIDDSWASIKSILDWTSRNQERIVDVAGPGGWNDPDMLVIGNFGLSWDQQVTQMALWAIMAGPLFMSNDLRAISPQAKALLQDKDVIAINQDPLGKQGYQLRKGDNFEVWERPLSGDAWAVAIINRQEIGGPRSYTIPVASLGKGVACNPACFITQLLPVKRKLGFYEATSRLRSHINPTGTVLLQLENTMQTSLKDLL

SEQ ID NO: 231 - DNA, 1197 bp, Artificial Sequence
  variant of human alpha-galactosidase A
ttggataacgggttagcccgtacacctccgatgggttggcttcactgggaaagattcatgtgtaacttagattgccaagaagagcctgacagctgtatctcagagaaactattcgaagagatggctgaacggatggtaaccgaaggatggaaggatgctggttatgaatacctatgtattgatgattgctggatggctccacagcgtgattcagaaggtaggttacaagctgacccccagagattcccacatggcatacgtcagcttgcaaaccatgtacacagcaaaggtctaaagttaggcatctacgctgatgtcggaaacaagacatgtgctggtttcccaggttcattcggttactatgacatagatgcgcagacgtttgctgattggggtgttgatttgttgaagtttgatggatgctactgcgattccctggagaacctagccgatgggtacaaacacatgagtttggctctaaacaggactggtaggccgatcgtctatagttgtgaatggcccttgtacatgtggccgtttcagaagccaaactacactgagataagacaatactgtaaccattggcgtaactttgctgacatagatgattcatgggcttcaatcaaatctatcttggattggacttctcgtaaccaggaaagaattgttgatgttgcaggtccaggtggatggaatgaccctgatatgcttgtcatagggaactttgggctatcatgggaccaacaagttacacaaatggctttgtgggcgatcatggccggccccctattcatgtctaatgatctacgtgcgatatcaccccaagcaaaggctttacttcaagataaggatgtcatagcgatcaaccaagatcctcttggtaaacaaggttatcaattgagaaaaggtgacaactttgaagtgtgggaaagaccattgtctggagacgcgtgggctgttgctattatcaaccgtcaagagatcggagggccaagatcttacactatcccggtagcctctttgggtaagggtgttgcgtgcaatcctgcctgcttcattacacaattgcttccagttaagagaaaattgggtttctatgaagcaacctctaggctaagaagtcacattaatcctactggtacggtattgttgcaattggagaacacaatgcaaacctctttgaaagatttggtgtaa

SEQ ID NO: 232 - protein, 398 aa, Artificial Sequence
  variant of human alpha-galactosidase A
LDNGLARTPPMGWLHWERFMCNLDCQEEPDSCISEKLFEEMAERMVTEGWKDAGYEYLCIDDCWMAPQRDSEGRLQADPQRFPHGIRQLANHVHSKGLKLGIYADVGNKTCAGFPGSFGYYDIDAQTFADWGVDLLKFDGCYCDSLENLADGYKHMSLALNRTGRPIVYSCEWPLYMWPFQKPNYTEIRQYCNHWRNFADIDDSWASIKSILDWTSRNQERIVDVAGPGGWNDPDMLVIGNFGLSWDQQVTQMALWAIMAGPLFMSNDLRAISPQAKALLQDKDVIAINQDPLGKQGYQLRKGDNFEVWERPLSGDAWAVAIINRQEIGGPRSYTIPVASLGKGVACNPACFITQLLPVKRKLGFYEATSRLRSHINPTGTVLLQLENTMQTSLKDLV

SEQ ID NO: 233 - DNA, 1197 bp, Artificial Sequence
  variant of human alpha-galactosidase A
ttggataacgggttagcccgtacacctccgatgggttggcttcactgggaaagattcatgtgtaacttagattgccaagaagagcctgacagctgtatctcagagaaactattcgaagagatggctgaacggatggtaaccgaaggatggaaggatgctggttatgaatacctatgtattgatgattgctggatggctccacagcgtgattcagaaggtaggttacaagctgacccccagagattcccacatggcatacgtcagcttgcaaaccatgtacacagcaaaggtctaaagttaggcatctacgctgatgtcggaaacaagacatgtgctggtttcccaggttcattcggttactatgacatagatgcgcagacgtttgctgattggggtgttgatttgttgaagtttgatggatgctactgcgattccctggagaacctagccgatgggtacaaacacatgagtttggctctaaacaggactggtaggccgatcgtctatagttgtgaatggcccttgtacatgtggccgtttcagaagccaaactacactgagataagacaatactgtaaccattggcgtaactttgctgacatagatgattcatgggcttcaatcaaatctatcttggattggacttctcgtaaccaggaaagaattgttgatgttgcaggtccaggtggatggaatgaccctgatatgcttgtcatagggaactttgggctatcatgggaccaacaagttacacaaatggctttgtgggcgatcatggccggccccctattcatgtctaatgatctacgtgcgatatcaccccaagcaaaggctttacttcaagataaggatgtcatagcgatcaaccaagatcctcttggtaaacaaggttatcaattgagaaaaggtgacaactttgaagtgtgggaaagaccattgtctggagacgcgtgggctgttgctattatcaaccgtcaagagatcggagggccaagatcttacactatcccggtagcctctttgggtaagggtgttgcgtgcaatcctgcctgcttcattacacaattgcttccagttaagagaaaattgggtttctatgaagcaacctctaggctaagaagtcacattaatcctactggtacggtattgttgcaattggagaacacaatgcaaacctctttgaaagatttgccgtaa

SEQ ID NO: 234 - protein, 398 aa, Artificial Sequence
  variant of human alpha-galactosidase A
LDNGLARTPPMGWLHWERFMCNLDCQEEPDSCISEKLFEEMAERMVTEGWKDAGYEYLCIDDCWMAPQRDSEGRLQADPQRFPHGIRQLANHVHSKGLKLGIYADVGNKTCAGFPGSFGYYDIDAQTFADWGVDLLKFDGCYCDSLENLADGYKHMSLALNRTGRPIVYSCEWPLYMWPFQKPNYTEIRQYCNHWRNFADIDDSWASIKSILDWTSRNQERIVDVAGPGGWNDPDMLVIGNFGLSWDQQVTQMALWAIMAGPLFMSNDLRAISPQAKALLQDKDVIAINQDPLGKQGYQLRKGDNFEVWERPLSGDAWAVAIINRQEIGGPRSYTIPVASLGKGVACNPACFITQLLPVKRKLGFYEATSRLRSHINPTGTVLLQLENTMQTSLKDLP

SEQ ID NO: 235 - DNA, 1197 bp, Artificial Sequence
  variant of human alpha-galactosidase A
ttggataacgggttagcccgtacacctccgatgggttggcttcactgggaaagattcatgtgtaacttagattgccaagaagagcctgacagctgtatctcagagaaactattcgaagagatggctgaacggatggtaaccgaaggatggaaggatgctggttatgaatacctatgtattgatgattgctggatggctccacagcgtgattcagaaggtaggttacaagctgacccccagagattcccacatggcatacgtcagcttgcaaaccatgtacacagcaaaggtctaaagttaggcatctacgctgatgtcggaaacaagacatgtgctggtttcccaggttcattcggttactatgacatagatgcgcagacgtttgctgattggggtgttgatttgttgaagtttgatggatgctactgcgattccctggagaacctagccgatgggtacaaacacatgagtttggctctaaacaggactggtaggccgatcgtctatagttgtgaatggcccttgtacatgtggccgtttcagaagccaaactacactgagataagacaatactgtaaccattggcgtaactttgctgacatagatgattcatgggcttcaatcaaatctatcttggattggacttctcgtaaccaggaaagaattgttgatgttgcaggtccaggtggatggaatgaccctgatatgcttgtcatagggaactttgggctatcatgggaccaacaagttacacaaatggctttgtgggcgatcatggccggccccctattcatgtctaatgatctacgtgcgatatcaccccaagcaaaggctttacttcaagataaggatgtcatagcgatcaaccaagatcctcttggtaaacaaggttatcaattgatgaaaggtgacaactttgaagtgtgggaaagaccattgtctggagacgcgtgggctgttgctattatcaaccgtcaagagatcggagggccaagatcttacactatcccggtagcctctttgggtaagggtgttgcgtgcaatcctgcctgcttcattacacaattgcttccagttaagagaaaattgggtttctatgaagcaacctctaggctaagaagtcacattaatcctactggtacggtattgttgcaattggagaacacaatgcaaacctctttgaaagatttgttataa

SEQ ID NO: 236 - protein, 398 aa, Artificial Sequence
  variant of human alpha-galactosidase A
LDNGLARTPPMGWLHWERFMCNLDCQEEPDSCISEKLFEEMAERMVTEGWKDAGYEYLCIDDCWMAPQRDSEGRLQADPQRFPHGIRQLANHVHSKGLKLGIYADVGNKTCAGFPGSFGYYDIDAQTFADWGVDLLKFDGCYCDSLENLADGYKHMSLALNRTGRPIVYSCEWPLYMWPFQKPNYTEIRQYCNHWRNFADIDDSWASIKSILDWTSRNQERIVDVAGPGGWNDPDMLVIGNFGLSWDQQVTQMALWAIMAGPLFMSNDLRAISPQAKALLQDKDVIAINQDPLGKQGYQLMKGDNFEVWERPLSGDAWAVAIINRQEIGGPRSYTIPVASLGKGVACNPACFITQLLPVKRKLGFYEATSRLRSHINPTGTVLLQLENTMQTSLKDLL

SEQ ID NO: 237 - DNA, 1197 bp, Artificial Sequence
  variant of human alpha-galactosidase A
ttggataacgggttagcccgtacacctccgatgggttggcttcactgggaaagattcatgtgtaacttagattgccaagaagagcctgacagctgtatctcagagaaactattcgaagagatggctgaacggatggtaaccgaaggatggaaggatgctggttatgaatacctatgtattgatgattgctggatggctccacagcgtgattcagaaggtaggttacaagctgacccccagagattcccacatggcatacgtcagcttgcaaaccatgtacacagcaaaggtctaaagttaggcatctacgctgatgtcggaaacaagacatgtgctggtttcccaggttcattcggttactatgacatagatgcgcagacgtttgctgattggggtgttgatttgttgaagtttgatggatgctactgcgattccctggagaacctagccgatgggtacaaacacatgagtttggctctaaacaggactggtaggccgatcgtctatagttgtgaatggcccttgtacatgtggccgtttcagaagccaaactacactgagataagacaatactgtaaccattggcgtaactttgctgacatagatgattcatgggcttcaatcaaatctatcttggattggacttctcgtaaccaggaaagaattgttgatgttgcaggtccaggtggatggaatgaccctgatatgcttgtcatagggaactttgggctatcatgggaccaacaagttacacaaatggctttgtgggcgatcatggccggccccctattcatgtctaatgatctacgtgcgatatcaccccaagcaaaggctttacttcaagataaggatgtcatagcgatcaaccaagatcctcttggtaaacaaggttatcaattgagaaaaggtgacaactttgaagtgtgggaaagaccattgtctggagacgcgtgggctgttgctattatcaaccgtcaagagatcggagggccaagatcttacactatccgggtagcctctttgggtaagggtgttgcgtgcaatcctgcctgcttcattacacaattgcttccagttaagagaaaattgggtttctatgaagcaacctctaggctaagaagtcacattaatcctactggtacggtattgttgcaattggagaacacaatgcaaacctctttgaaagatttgttataa

SEQ ID NO: 238 - protein, 398 aa, Artificial Sequence
  variant of human alpha-galactosidase A
LDNGLARTPPMGWLHWERFMCNLDCQEEPDSCISEKLFEEMAERMVTEGWKDAGYEYLCIDDCWMAPQRDSEGRLQADPQRFPHGIRQLANHVHSKGLKLGIYADVGNKTCAGFPGSFGYYDIDAQTFADWGVDLLKFDGCYCDSLENLADGYKHMSLALNRTGRPIVYSCEWPLYMWPFQKPNYTEIRQYCNHWRNFADIDDSWASIKSILDWTSRNQERIVDVAGPGGWNDPDMLVIGNFGLSWDQQVTQMALWAIMAGPLFMSNDLRAISPQAKALLQDKDVIAINQDPLGKQGYQLRKGDNFEVWERPLSGDAWAVAIINRQEIGGPRSYTIRVASLGKGVACNPACFITQLLPVKRKLGFYEATSRLRSHINPTGTVLLQLENTMQTSLKDLL

SEQ ID NO: 239 - DNA, 1197 bp, Artificial Sequence
  variant of human alpha-galactosidase A
ttggataacgggttagcccgtacacctccgatgggttggcttcactgggaaagattcatgtgtaacttagattgccaagaagagcctgacagctgtatctcagagaaactattcgaagagatggctgaacggatggtaaccgaaggatggaaggatgctggttatgaatacctatgtattgatgattgctggatggctccacagcgtgattcagaaggtaggttacaagctgacccccagagattcccacatggcatacgtcagcttgcaaaccatgtacacagcaaaggtctaaagttaggcatctacgctgatgtcggaaacaagacatgtgctggtttcccaggttcattcggttactatgacatagatgcgcagacgtttgctgattggggtgttgatttgttgaagtttgatggatgctactgcgattccctggagaacctagccgatgggtacaaacacatgagtttggctctaaacaggactggtaggccgatcgtctatagttgtgaatggcccttgtacatgtggccgtttcagaagccaaactacactgagataagacaatactgtaaccattggcgtaactttgctgacatagatgattcatgggcttcaatcaaatctatcttggattggacttctcgtaaccaggaaagaattgttgatgttgcaggtccaggtggatggaatgaccctgatatgcttgtcatagggaactttgggctatcatgggaccaacaagttacacaaatggctttgtgggcgatcatggccggccccctattcatgtctaatgatctacgtgcgatatcaccccaagcaaaggctttacttcaagataaggatgtcatagcgatcaaccaagatcctcttggtaaacaaggttatcaattgagaaaaggtgacaactttgaagtgtgggaaagaccattgtctggagacgcgtgggctgttgctattatcaaccgtcaagagatcggagggccaagagggtacactatcccggtagcctctttgggtaagggtgttgcgtgcaatcctgcctgcttcattacacaattgcttccagttaagagaaaattgggtttctatgaagcaacctctaggctaagaagtcacattaatcctactggtacggtattgttgcaattggagaacacaatgcaaacctctttgaaagatttgttataa

SEQ ID NO: 240 - protein, 398 aa, Artificial Sequence
  variant of human alpha-galactosidase A
LDNGLARTPPMGWLHWERFMCNLDCQEEPDSCISEKLFEEMAERMVTEGWKDAGYEYLCIDDCWMAPQRDSEGRLQADPQRFPHGIRQLANHVHSKGLKLGIYADVGNKTCAGFPGSFGYYDIDAQTFADWGVDLLKFDGCYCDSLENLADGYKHMSLALNRTGRPIVYSCEWPLYMWPFQKPNYTEIRQYCNHWRNFADIDDSWASIKSILDWTSRNQERIVDVAGPGGWNDPDMLVIGNFGLSWDQQVTQMALWAIMAGPLFMSNDLRAISPQAKALLQDKDVIAINQDPLGKQGYQLRKGDNFEVWERPLSGDAWAVAIINRQEIGGPRGYTIPVASLGKGVACNPACFITQLLPVKRKLGFYEATSRLRSHINPTGTVLLQLENTMQTSLKDLL

SEQ ID NO: 241 - DNA, 1197 bp, Artificial Sequence
  variant of human alpha-galactosidase A
ttggataacgggttagcccgtacacctccgatgggttggcttcactgggaaagattcatgtgtaacttagattgccaagaagagcctgacagctgtatctcagagaaactattcgaagagatggctgaacggatggtaaccgaaggatggaaggatgctggttatgaatacctatgtattgatgattgctggatggctccacagcgtgattcagaaggtaggttacaagctgacccccagagattcccacatggcatacgtcagcttgcaaaccatgtacacagcaaaggtctaaagttaggcatctacgctgatgtcggaaacaagacatgtgctggtttcccaggttcattcggttactatgacatagatgcgcagacgtttgctgattggggtgttgatttgttgaagtttgatggatgctactgcgattccctggagaacctagccgatgggtacaaacacatgagtttggctctaaacaggactggtaggccgatcgtctatagttgtgaatggcccttgtacatgtggccgtttcagaagccaaactacactgagataagacaatactgtaaccattggcgtaactttgctgacatagatgattcatgggcttcaatcaaatctatcttggattggacttctcgtaaccaggaaagaattgttgatgttgcaggtccaggtggatggaatgaccctgatatgcttgtcatagggaactttgggctatcatgggaccaacaagttacacaaatggctttgtgggcgatcatggccggccccctattcatgtctaatgatctacgtgcgatatcaccccaagcaaaggctttacttcaagataaggatgtcatagcgatcaaccaagatcctcttggtaaacaaggttatcaattgagaaaaggtgacaactttgaagtgtgggaaagaccattgtctggagacgcgtgggctgttgctattatcaaccgtcaagagatcggagggccaagatcttacactatcccggtagcctctttgggtaagggtgttgcgtgcaatcctgcctgcttcattacacaattgcttccagttaagagaaaacagggtttctatgaagcaacctctaggctaagaagtcacattaatcctactggtacggtattgttgcaattggagaacacaatgcaaacctctttgaaagatttgttataa

SEQ ID NO: 242 - protein, 398 aa, Artificial Sequence
  variant of human alpha-galactosidase A
LDNGLARTPPMGWLHWERFMCNLDCQEEPDSCISEKLFEEMAERMVTEGWKDAGYEYLCIDDCWMAPQRDSEGRLQADPQRFPHGIRQLANHVHSKGLKLGIYADVGNKTCAGFPGSFGYYDIDAQTFADWGVDLLKFDGCYCDSLENLADGYKHMSLALNRTGRPIVYSCEWPLYMWPFQKPNYTEIRQYCNHWRNFADIDDSWASIKSILDWTSRNQERIVDVAGPGGWNDPDMLVIGNFGLSWDQQVTQMALWAIMAGPLFMSNDLRAISPQAKALLQDKDVIAINQDPLGKQGYQLRKGDNFEVWERPLSGDAWAVAIINRQEIGGPRSYTIPVASLGKGVACNPACFITQLLPVKRKQGFYEATSRLRSHINPTGTVLLQLENTMQTSLKDLL

SEQ ID NO: 243 - DNA, 1197 bp, Artificial Sequence
  variant of human alpha-galactosidase A
ttggataacgggttagcccgtacacctccgatgggttggcttcactgggaaagattcatgtgtaacttagattgccaagaagagcctgacagctgtatctcagagaaactattcgaagagatggctgaacggatggtagtggaaggatggaaggatgctggttatgaatacctatgtattgatgattgctggatggctccacagcgtgattcagaaggtaggttacaagctgacccccagagattcccacatggcatacgtcagcttgcaaaccatgtacacagcaaaggtctaaagttaggcatctacgctgatgtcggaaacaagacatgtgctggtttcccaggttcattcggttactatgacatagatgcgcagacgtttgctgattggggtgttgatttgttgaagtttgatggatgctactgcgattccctggagaacctagccgatgggtacaaacacatgagtttggctctaaacaggactggtaggccgatcgtctatagttgtgaatggcccttgtacatgtggccgtttcagaagccaaactacactgagataagacaatactgtaaccattggcgtaactttgctgacatagatgattcatgggcttcaatcaaatctatcttggattggacttctcgtaaccaggaaagaattgttgatgttgcaggtccaggtggatggaatgaccctgatatgcttgtcatagggaactttgggctatcatgggaccaacaagttacacaaatggctttgtgggcgatcatggccggccccctattcatgtctaatgatctacgtgcgatatcaccccaagcaaaggctttacttcaagataaggatgtcatagcgatcaaccaagatcctcttggtaaacaaggttatcaattgagaaaaggtgacaactttgaagtgtgggaaagaccattgtctggagacgcgtgggctgttgctattatcaaccgtcaagagatcggagggccaagatcttacactatcccggtagcctctttgggtaagggtgttgcgtgcaatcctgcctgcttcattacacaattgcttccagttaagagaaaattgggtttctatgaagcaacctctaggctaagaagtcacattaatcctactggtacggtattgttgcaattggagaacacaatgcaaacctctttgaaagatttgttataa

SEQ ID NO: 244 - protein, 398 aa, Artificial Sequence
  variant of human alpha-galactosidase A
LDNGLARTPPMGWLHWERFMCNLDCQEEPDSCISEKLFEEMAERMVVEGWKDAGYEYLCIDDCWMAPQRDSEGRLQADPQRFPHGIRQLANHVHSKGLKLGIYADVGNKTCAGFPGSFGYYDIDAQTFADWGVDLLKFDGCYCDSLENLADGYKHMSLALNRTGRPIVYSCEWPLYMWPFQKPNYTEIRQYCNHWRNFADIDDSWASIKSILDWTSRNQERIVDVAGPGGWNDPDMLVIGNFGLSWDQQVTQMALWAIMAGPLFMSNDLRAISPQAKALLQDKDVIAINQDPLGKQGYQLRKGDNFEVWERPLSGDAWAVAIINRQEIGGPRSYTIPVASLGKGVACNPACFITQLLPVKRKLGFYEATSRLRSHINPTGTVLLQLENTMQTSLKDLL

SEQ ID NO: 245 - DNA, 1197 bp, Artificial Sequence
  variant of human alpha-galactosidase A
ttggataacgggttagcccgtacacctccgatgggttggcttcactgggaaagattcatgtgtaacttagattgccaagaagagcctgacagctgtatctcagagaaactattcgaagagatggctgaacggatggtaaccgaaggatggaaggatgctggttatgaatacctatgtattgatgattgctggatggctccacagcgtgattcagaaggtaggttacaagctgacccccagagattcccacatggcatacgtcagcttgcaaacacggtacacagcaaaggtctaaagttaggcatctacgctgatgtcggaaacaagacatgtgctggtttcccaggttcattcggttactatgacatagatgcgcagacgtttgctgattggggtgttgatttgttgaagtttgatggatgctactgcgattccctggagaacctagccgatgggtacaaacacatgagtttggctctaaacaggactggtaggccgatcgtctatagttgtgaatggcccttgtacatgtggccgtttcagaagccaaactacactgagataagacaatactgtaaccattggcgtaactttgctgacatagatgattcatgggcttcaatcaaatctatcttggattggacttctcgtaaccaggaaagaattgttgatgttgcaggtccaggtggatggaatgaccctgatatgcttgtcatagggaactttgggctatcatgggaccaacaagttacacaaatggctttgtgggcgatcatggccggccccctattcatgtctaatgatctacgtgcgatatcaccccaagcaaaggctttacttcaagataaggatgtcatagcgatcaaccaagatcctcttggtaaacaaggttatcaattgagaaaaggtgacaactttgaagtgtgggaaagaccattgtctggagacgcgtgggctgttgctattatcaaccgtcaagagatcggagggccaagatcttacactatcccggtagcctctttgggtaagggtgttgcgtgcaatcctgcctgcttcattacacaattgcttccagttaagagaaaattgggtttctatgaagcaacctctaggctaagaagtcacattaatcctactggtacggtattgttgcaattggagaacacaatgcaaacctctttgaaagatttgttataa

SEQ ID NO: 246 - protein, 398 aa, Artificial Sequence
  variant of human alpha-galactosidase A
LDNGLARTPPMGWLHWERFMCNLDCQEEPDSCISEKLFEEMAERMVTEGWKDAGYEYLCIDDCWMAPQRDSEGRLQADPQRFPHGIRQLANTVHSKGLKLGIYADVGNKTCAGFPGSFGYYDIDAQTFADWGVDLLKFDGCYCDSLENLADGYKHMSLALNRTGRPIVYSCEWPLYMWPFQKPNYTEIRQYCNHWRNFADIDDSWASIKSILDWTSRNQERIVDVAGPGGWNDPDMLVIGNFGLSWDQQVTQMALWAIMAGPLFMSNDLRAISPQAKALLQDKDVIAINQDPLGKQGYQLRKGDNFEVWERPLSGDAWAVAIINRQEIGGPRSYTIPVASLGKGVACNPACFITQLLPVKRKLGFYEATSRLRSHINPTGTVLLQLENTMQTSLKDLL

SEQ ID NO: 247 - DNA, 1197 bp, Artificial Sequence
  variant of human alpha-galactosidase A
ttggataacgggttagcccgtacacctccgatgggttggcttcactgggaaagattcatgtgtaacttagattgccaagaagagcctgacagctgtatctcagagaaactattcgaagagatggctgaacggatggtaaccgaaggatggaaggatgctggttatgaatacctatgtattgatgattgctggatggctccacagcgtgattcagaaggtaggttacaagctgacccccagagattcccacatggcatacgtcagcttgcaaaccatgtacacagcaaaggtctaaagttaggcatctacgctgatgtcggaaacaagacatgtgctggtttcccaggttcattcggttactatgacatagatgcgcagacgtttgctgattggggtgttgatttgttgaagtttgatggatgctactgcgattccctggagaacctagccgatgggtacaaacacatgagtttggctctaaacaggactggtaggccgatcgtctatagttgtgaatggcccttgtacatgtggccgtttcagaagccaaactacactgagataagacaatactgtaaccattggcgtaactttgctgacatagatgattcatgggcttcaatcaaatctatcttggattggacttctcgtaaccaggaaagaattgttgatgttgcaggtccaggtggatggaatgaccctgatatgcttgtcatagggaactttgggctatcatgggaccaacaagttacacaaatggctttgtgggcgatcatggccggccccctattcatgtctaatgatctacgtgcgatatcaccccaagcaaaggctttacttcaagataaggatgtcatagcgatcaaccaagatcctcttggtaaacaaggttatcaattgagaaaaggtgacaactttgaagtgtgggaaagaccattgtctggagacgcgtgggctgttgctattatcaaccgtcaagagatcggagggccaagatcttacactatcccggtagcctctttgggtaagggtgttgcgtgcaatcctgcctgcttcattacacaattgcttccagttaagagaaaattgggtttctatgaagcaacctctaggctaagaagtcacattaatcctactggtacggtattgttgcaattggagaacacaatgcaaaccgttttgaaagatttgttataa

SEQ ID NO: 248 - protein, 398 aa, Artificial Sequence
  variant of human alpha-galactosidase A
LDNGLARTPPMGWLHWERFMCNLDCQEEPDSCISEKLFEEMAERMVTEGWKDAGYEYLCIDDCWMAPQRDSEGRLQADPQRFPHGIRQLANHVHSKGLKLGIYADVGNKTCAGFPGSFGYYDIDAQTFADWGVDLLKFDGCYCDSLENLADGYKHMSLALNRTGRPIVYSCEWPLYMWPFQKPNYTEIRQYCNHWRNFADIDDSWASIKSILDWTSRNQERIVDVAGPGGWNDPDMLVIGNFGLSWDQQVTQMALWAIMAGPLFMSNDLRAISPQAKALLQDKDVIAINQDPLGKQGYQLRKGDNFEVWERPLSGDAWAVAIINRQEIGGPRSYTIPVASLGKGVACNPACFITQLLPVKRKLGFYEATSRLRSHINPTGTVLLQLENTMQTVLKDLL

SEQ ID NO: 249 - DNA, 1197 bp, Artificial Sequence
  variant of human alpha-galactosidase A
ttggataacgggttagcccgtacacctccgatgggttggcttcactgggaaagattcatgtgtaacttagattgccaagaagagcctgacagctgtatctcagagaaactattcgaagagatggctgaacggatggtaaccgaaggatggaaggatgctggttatgaatacctatgtattgatgattgctggatggctccacagcgtgattcagaaggtaggttacaagctgacccccagagattcccacatggcatacgtcagcttgcaaaccatgtacacagcaaaggtctaaagttaggcatctacgctgatgtcggaaacaagacatgtgctggtttcccaggttcattcggttactatgacatagatgcgcagacgtttgctgattggggtgttgatttgttgaagtttgatggatgctactgcgattccctggagaacctagccctggggtacaaacacatgagtttggctctaaacaggactggtaggccgatcgtctatagttgtgaatggcccttgtacatgtggccgtttcagaagccaaactacactgagataagacaatactgtaaccattggcgtaactttgctgacatagatgattcatgggcttcaatcaaatctatcttggattggacttctcgtaaccaggaaagaattgttgatgttgcaggtccaggtggatggaatgaccctgatatgcttgtcatagggaactttgggctatcatgggaccaacaagttacacaaatggctttgtgggcgatcatggccggccccctattcatgtctaatgatctacgtgcgatatcaccccaagcaaaggctttacttcaagataaggatgtcatagcgatcaaccaagatcctcttggtaaacaaggttatcaattgagaaaaggtgacaactttgaagtgtgggaaagaccattgtctggagacgcgtgggctgttgctattatcaaccgtcaagagatcggagggccaagatcttacactatcccggtagcctctttgggtaagggtgttgcgtgcaatcctgcctgcttcattacacaattgcttccagttaagagaaaattgggtttctatgaagcaacctctaggctaagaagtcacattaatcctactggtacggtattgttgcaattggagaacacaatgcaaacctctttgaaagatttgttataa

SEQ ID NO: 250 - protein, 398 aa, Artificial Sequence
  variant of human alpha-galactosidase A
LDNGLARTPPMGWLHWERFMCNLDCQEEPDSCISEKLFEEMAERMVTEGWKDAGYEYLCIDDCWMAPQRDSEGRLQADPQRFPHGIRQLANHVHSKGLKLGIYADVGNKTCAGFPGSFGYYDIDAQTFADWGVDLLKFDGCYCDSLENLALGYKHMSLALNRTGRPIVYSCEWPLYMWPFQKPNYTEIRQYCNHWRNFADIDDSWASIKSILDWTSRNQERIVDVAGPGGWNDPDMLVIGNFGLSWDQQVTQMALWAIMAGPLFMSNDLRAISPQAKALLQDKDVIAINQDPLGKQGYQLRKGDNFEVWERPLSGDAWAVAIINRQEIGGPRSYTIPVASLGKGVACNPACFITQLLPVKRKLGFYEATSRLRSHINPTGTVLLQLENTMQTSLKDLL

SEQ ID NO: 251 - DNA, 1197 bp, Artificial Sequence
  variant of human alpha-galactosidase A
ttggataacgggttagcccgtacacctccgatgggttggcttcactgggaaagattcatgtgtaacttagattgccaagaagagcctgacagctgtatctcagagaaactattcgaagagatggctgaacggatggtaaccgaaggatggaaggatgctggttatgaatacctatgtattgatgattgctggatggctccacagcgtgattcagaaggtaggttacaagctgacccccagagattcccacatggcatacgtcagcttgcaaaccatgtacacagcaaaggtctaaagttaggcatctacgctgatgtcggaaacaagacatgtgctggtttcccaggttcattcggttactatgacatagatgcgcagacgtttgctgattggggtgttgatttgttgaagtttgatggatgctactgcgattccctggagaacctagccgatgggtacaaacacatgagtttggctctaaacaggactggtaggccgatcgtctatagttgtgaatggcccttgtacatgtggccgtttcagaagccaaactacactgagataagacaatactgtaaccattggcgtaactttgctgacatagatgattcatgggcttcaatcaaatctatcttggattggacttctcgtaaccaggaaagaattgttgatgttgcaggtccaggtggatggaatgaccctgatatgcttgtcataggtaactttgggctatcatgggaccaacaagttacacaaatggctttgtgggcgatcatggccggccccctattcatgtctaatgatctacgtgcgatatcaccccaagcaaaggctttacttcaagataaggatgtcatagcgatcaaccaagatcctcttggtaaacaaggttatcaattgagaaaaggtgacaactttgaagtgtgggaaagaccattgtctggagacgcgtgggctgttgctattatcaaccgtcaagagatcggagggccaagattttacactatcccggtagcctctttgggtaagggtgttgcgtgcaatcctgcctgcttcattacacaattgcttccagttaagagaaaattgggtttctatgaagcaacctctaggctaagaagtcacattaatcctactggtacggtattgttgcaattggagaacacaatgcaaacctctttgaaagatttgttataa

SEQ ID NO: 252 - protein, 398 aa, Artificial Sequence
  variant of human alpha-galactosidase A
LDNGLARTPPMGWLHWERFMCNLDCQEEPDSCISEKLFEEMAERMVTEGWKDAGYEYLCIDDCWMAPQRDSEGRLQADPQRFPHGIRQLANHVHSKGLKLGIYADVGNKTCAGFPGSFGYYDIDAQTFADWGVDLLKFDGCYCDSLENLADGYKHMSLALNRTGRPIVYSCEWPLYMWPFQKPNYTEIRQYCNHWRNFADIDDSWASIKSILDWTSRNQERIVDVAGPGGWNDPDMLVIGNFGLSWDQQVTQMALWAIMAGPLFMSNDLRAISPQAKALLQDKDVIAINQDPLGKQGYQLRKGDNFEVWERPLSGDAWAVAIINRQEIGGPRFYTIPVASLGKGVACNPACFITQLLPVKRKLGFYEATSRLRSHINPTGTVLLQLENTMQTSLKDLL

SEQ ID NO: 253 - DNA, 1197 bp, Artificial Sequence
  variant of human alpha-galactosidase A
ttggataacgggttagcccgtacacctccgatgggttggcttcactgggaaagattcatgtgtaacttagattgccaagaagagcctgacagctgtatctcagagaaactattcgaagagatggctgaacggatggtaaccgaaggatggaaggatgctggttatgaatacctatgtattgatgattgctggatggctccacagcgtgattcagaaggtaggttacaagctgacccccagagattcccacatggcatacgtcagcttgcaaaccatgtacacagcaaaggtctaaagttaggcatctacgctgatgtcggaaacaagacatgtgctggtttcccaggttcattcggttactatgacatagatgcgcagacgtttgctgattggggtgttgatttgttgaagtttgatggatgctactgcgattccctggagaacctagccgatgggtacaaacacatgagtttggctctaaacaggactggtaggccgatcgtctatagttgtgaatggcccttgtacatgtggccgtttcagaagccaaactacactgagataagacaatactgtaaccattggcgtaactttgctgacatagatgattcatgggcttcaatcaaatctatcttggattggacttctcgtaaccaggaaagaattgttgatgttgcaggtccaggtggatggaatgaccctgatatgcttgtcatagggaactttgggctatcatgggaccaacaagttacacaaatggctttgtgggcgatcatggccggccccctattcatgtctaatgatctacgtgcgatatcaccccaagcaaaggctttacttcaagataaggatgtcatagcgatcaaccaagatcctcctggtaaacaaggttatcaattaagaaagggtgacaactttgaagtgtgggaaagaccattgtctggagacgcgtgggctgttgctattatcaaccgtcaagagatcggagggccaagatcttacactatcccggtagcctctttgggtaagggtgttgcgtgcaatcctgcctgcttcattacacaattgcttccagttaagagaaaattgggtttctatgaagcaacctctaggctaagaagtcacattaatcctactggtacggtattgttgcaattggagaacacaatggctacctctttgaaagatttgttataa

SEQ ID NO: 254 - protein, 398 aa, Artificial Sequence
  variant of human alpha-galactosidase A
LDNGLARTPPMGWLHWERFMCNLDCQEEPDSCISEKLFEEMAERMVTEGWKDAGYEYLCIDDCWMAPQRDSEGRLQADPQRFPHGIRQLANHVHSKGLKLGIYADVGNKTCAGFPGSFGYYDIDAQTFADWGVDLLKFDGCYCDSLENLADGYKHMSLALNRTGRPIVYSCEWPLYMWPFQKPNYTEIRQYCNHWRNFADIDDSWASIKSILDWTSRNQERIVDVAGPGGWNDPDMLVIGNFGLSWDQQVTQMALWAIMAGPLFMSNDLRAISPQAKALLQDKDVIAINQDPPGKQGYQLRKGDNFEVWERPLSGDAWAVAIINRQEIGGPRSYTIPVASLGKGVACNPACFITQLLPVKRKLGFYEATSRLRSHINPTGTVLLQLENTMATSLKDLL

SEQ ID NO: 255 - DNA, 1197 bp, Artificial Sequence
  variant of human alpha-galactosidase A
ttggataacgggttagcccgtacacctccgatgggttggcttcactgggaaagattcatgtgtaacttagattgccaagaagagcctgacagctgtatctcagagaaactattcgaagagatggctgaacggatggtaaccgaaggatggaaggatgctggttatgaatacctatgtattgatgattgctggatggctccacagcgtgattcagaaggtaggttacaagctgacccccagagattcccacatggcatacgtcagcttgcaaaccatgtacacagcaaaggtctaaagttaggcatctacgctgatgtcggaaacaagacatgtgctggtttcccaggttcattcggttactatgacatagatgcgcagacgtttgctgattggggtgttgatttgttgaagtttgatggatgctactgcgattccctggagaacctagccgatgggtacaaacacatgagtttggctctaaacaggactggtaggccgatcgtctatagttgtgaatggcccttgtacatgtggccgtttcagaagccaaactacactgagataagacaatactgtaaccattggcgtaactttgctgacatagatgattcatgggcttcaatcaaatctatcttggattggacttctcgtaaccaggaaagaattgttgatgttgcaggtccaggtggatggaatgaccctgatatgcttgtcatagggaactttgggctatcatgggaccaacaagttacacaaatggctttgtgggcgatcatggccggccccctattcatgtctaatgatctacgtgcgatatcaccccaagcaaaggctttacttcaagataaggatgtcatagcgatcaaccaagatcctcttggtaaacaaggttatcaattgagaaaaggtgacaactttgaagtgtgggaaagaccattgtctggagacgcgtgggctgttgctattatcaaccgtcaagagatcggagggccaagatcttacactatcccggtagcctctttgggtaagggtcaggcgtgcaatcctgcctgcttcattacacaattgcttccagttaagagaaaattgggtttctatgaagcaacctctaggctaagaagtcacattaatcctactggtacggtattgttgcaattggagaacacaatgcaaacctctttgaaagatttgttataa

SEQ ID NO: 256 - protein, 398 aa, Artificial Sequence
  variant of human alpha-galactosidase A
LDNGLARTPPMGWLHWERFMCNLDCQEEPDSCISEKLFEEMAERMVTEGWKDAGYEYLCIDDCWMAPQRDSEGRLQADPQRFPHGIRQLANHVHSKGLKLGIYADVGNKTCAGFPGSFGYYDIDAQTFADWGVDLLKFDGCYCDSLENLADGYKHMSLALNRTGRPIVYSCEWPLYMWPFQKPNYTEIRQYCNHWRNFADIDDSWASIKSILDWTSRNQERIVDVAGPGGWNDPDMLVIGNFGLSWDQQVTQMALWAIMAGPLFMSNDLRAISPQAKALLQDKDVIAINQDPLGKQGYQLRKGDNFEVWERPLSGDAWAVAIINRQEIGGPRSYTIPVASLGKGQACNPACFITQLLPVKRKLGFYEATSRLRSHINPTGTVLLQLENTMQTSLKDLL

SEQ ID NO: 257 - DNA, 1197 bp, Artificial Sequence
  variant of human alpha-galactosidase A
ttggataacgggttagcccgtacacctccgatgggttggcttcactgggaaagattcatgtgtaacttagattgccaagaagagcctgacagctgtatctcagagaaactattcgtggagatggctgaacggatggtaaccgaaggatggaaggatgctggttatgaatacctatgtattgatgattgctggatggctccacagcgtgattcagaaggtaggttacaagctgacccccagagattcccacatggcatacgtcagcttgcaaaccatgtacacagcaaaggtctaaagttaggcatctacgctgatgtcggaaacaagacatgtgctggtttcccaggttcattcggttactatgacatagatgcgcagacgtttgctgattggggtgttgatttgttgaagtttgatggatgctactgcgattccctggagaacctagccgatgggtacaaacacatgagtttggctctaaacaggactggtaggccgatcgtctatagttgtgaatggcccttgtacatgtggccgtttcagaagccaaactacactgagataagacaatactgtaaccattggcgtaactttgctgacatagatgattcatgggcttcaatcaaatctatcttggattggacttctcgtaaccaggaaagaattgttgatgttgcaggtccaggtggatggaatgaccctgatatgcttgtcatagggaactttgggctatcatgggaccaacaagttacacaaatggctttgtgggcgatcatggccggccccctattcatgtctaatgatctacgtgcgatatcaccccaagcaaaggctttacttcaagataaggatgtcatagcgatcaaccaagatcctcttggtaaacaaggttatcaattgagaaaaggtgacaactttgaagtgtgggaaagaccattgtctggagacgcgtgggctgttgctattatcaaccgtcaagagatcggagggccaagatcttacactatcccggtagcctctttgggtaagggtgttgcgtgcaatcctgcctgcttcattacacaattgcttccagttaagagaaaattgggtttctatgaagcaacctctaggctaagaagtcacattaatcctactggtacggtattgttgcaattggagaacacaatgcaaacctctttgaaagatttgttataa

SEQ ID NO: 258 - protein, 398 aa, Artificial Sequence
  variant of human alpha-galactosidase A
LDNGLARTPPMGWLHWERFMCNLDCQEEPDSCISEKLFVEMAERMVTEGWKDAGYEYLCIDDCWMAPQRDSEGRLQADPQRFPHGIRQLANHVHSKGLKLGIYADVGNKTCAGFPGSFGYYDIDAQTFADWGVDLLKFDGCYCDSLENLADGYKHMSLALNRTGRPIVYSCEWPLYMWPFQKPNYTEIRQYCNHWRNFADIDDSWASIKSILDWTSRNQERIVDVAGPGGWNDPDMLVIGNFGLSWDQQVTQMALWAIMAGPLFMSNDLRAISPQAKALLQDKDVIAINQDPLGKQGYQLRKGDNFEVWERPLSGDAWAVAIINRQEIGGPRSYTIPVASLGKGVACNPACFITQLLPVKRKLGFYEATSRLRSHINPTGTVLLQLENTMQTSLKDLL

SEQ ID NO: 259 - DNA, 1197 bp, Artificial Sequence
  variant of human alpha-galactosidase A
ttggataacgggttagcccgtacacctccgatgggttggcttcactgggaaagattcatgtgtaacttagattgccaagaagagcctgacagctgtatctcagagaaactattcgaagagatggctgaacggatggtaaccgaaggatggaaggatgctggttatgaatacctatgtattgatgattgctggatggctccacagcgtgattcagaaggtaggttacaagctgacccccagagattcccacatggcatacgtcagcttgcaaaccatgtacacagcaaaggtctaaagttaggcatctacgctgatgtcggaaacaagacatgtgctggtttcccaggttcattcggttactatgacatagatgcgcagacgtttgctgattggggtgttgatttgttgaagtttgatggatgctactgcgattccctggagaacctagccgatgggtacaaacacatgagtttggctctaaacaggactggtaggccgatcgtctatagttgtgaatggcccttgtacatgtggccgtttcagaagccaaactacactgagataagacaatactgtaaccattggcgtaactttgctgacatagatgattcatgggcttcaatcaaatctatcttggattggacttctaagaaccaggaaagaattgttgatgttgcaggtccaggtggatggaatgaccctgatatgcttgtcatagggaactttgggctatcatgggaccaacaagttacacaaatggctttgtgggcgatcatggccggccccctattcatgtctaatgatctacgtgcgatatcaccccaagcaaaggctttacttcaagataaggatgtcatagcgatcaaccaagatcctcttggtaaacaaggttatcaattgagaaaaggtgacaactttgaagtgtgggaaagaccattgtctggagacgcgtgggctgttgctattatcaaccgtcaagagatcggagggccaagatcttacactatcccggtagcctctttgggtaagggtgttgcgtgcaatcctgcctgcttcattacacaattgcttccagttaagagaaaattgggtttctatgaagcaacctctaggctaagaagtcacattaatcctactggtacggtattgttgcaattggagaacacaatgcaaacctctttgaaagatttgttataa

SEQ ID NO: 260 - protein, 398 aa, Artificial Sequence
  variant of human alpha-galactosidase A
LDNGLARTPPMGWLHWERFMCNLDCQEEPDSCISEKLFEEMAERMVTEGWKDAGYEYLCIDDCWMAPQRDSEGRLQADPQRFPHGIRQLANHVHSKGLKLGIYADVGNKTCAGFPGSFGYYDIDAQTFADWGVDLLKFDGCYCDSLENLADGYKHMSLALNRTGRPIVYSCEWPLYMWPFQKPNYTEIRQYCNHWRNFADIDDSWASIKSILDWTSKNQERIVDVAGPGGWNDPDMLVIGNFGLSWDQQVTQMALWAIMAGPLFMSNDLRAISPQAKALLQDKDVIAINQDPLGKQGYQLRKGDNFEVWERPLSGDAWAVAIINRQEIGGPRSYTIPVASLGKGVACNPACFITQLLPVKRKLGFYEATSRLRSHINPTGTVLLQLENTMQTSLKDLL

SEQ ID NO: 261 - DNA, 1197 bp, Artificial Sequence
  variant of human alpha-galactosidase A
ttggataacgggttagcccgtacacctccgatgggttggcttcactgggaaagattcatgtgtaacttagattgccaagaagagcctgacagctgtatctcagagaaactattcgaagagatggctgaacggatggtaaccgaaggatggaaggatgctggttatgaatacctatgtattgatgattgctggatggctccacagcgtgattcagaaggtaggttacaagctgacccccagagattcccacatggcatacgtcagcttgcaaaccatgtacacagcaaaggtctaaagttaggcatctacgctgatgtcggaaacaagacatgtgctggtttcccaggttcattcggttactatgacatagatgcgcagacgtttgctgattggggtgttgatttgttgaagtttgatggatgctactgcgattccctggagaacctagccgatgggtacaaacacatgagtttggctctaaacaggactggtaggccgatcgtctatagttgtgaatggcccttgtacatgtggccgtttcagaagccaaactacactgagataagacaatactgtaaccattggcgtaactttgctgacatagatgattcatgggcttcaatcaaatctatcttggattggacttctcgtaaccaggaaagaattgttgatgttgcaggtccaggtggatggaatgaccctgatatgcttgtcatagggaactttgggctatcatgggaccaacaagttacacaaatggctttgtgggcgatcatggccggccccctattcatgtctaatgatctacgtgcgatatcaccccaagcaaaggctttacttcaagataaggatgtcatagcgatcaaccaagatcctcttggtaaacaaggttatcaattgagaaaaggtgacaactttgaagtgtgggaaagaccattgtctggagacgcgtgggctgttgctattatcaaccgtcaagagatcggagggccaagatcttacactatcccggtagcctctttgggtaagggtgttgcgtgcaatcctgcctgcttcattacacaattgcttccagttaagagaaaattgggtttctatgaagcaacctctaggctaagaagtcacattaatcctactggtacggtattgttgcaattggagaacacaatgcaaacctctttgaaagatttggcttaa

SEQ ID NO: 262 - protein, 398 aa, Artificial Sequence
  variant of human alpha-galactosidase A
LDNGLARTPPMGWLHWERFMCNLDCQEEPDSCISEKLFEEMAERMVTEGWKDAGYEYLCIDDCWMAPQRDSEGRLQADPQRFPHGIRQLANHVHSKGLKLGIYADVGNKTCAGFPGSFGYYDIDAQTFADWGVDLLKFDGCYCDSLENLADGYKHMSLALNRTGRPIVYSCEWPLYMWPFQKPNYTEIRQYCNHWRNFADIDDSWASIKSILDWTSRNQERIVDVAGPGGWNDPDMLVIGNFGLSWDQQVTQMALWAIMAGPLFMSNDLRAISPQAKALLQDKDVIAINQDPLGKQGYQLRKGDNFEVWERPLSGDAWAVAIINRQEIGGPRSYTIPVASLGKGVACNPACFITQLLPVKRKLGFYEATSRLRSHINPTGTVLLQLENTMQTSLKDLA

SEQ ID NO: 263 - DNA, 1197 bp, Artificial Sequence
  variant of human alpha-galactosidase A
ttggataacgggttagcccgtacacctccgatgggttggcttcactgggaaagattcatgtgtaacttagattgccaagaagagcctgacagctgtatctcagagaaactattcgaagagatggctgaacggatggtaactgacggatggaaggatgctggttatgaatacctatgtattgatgattgctggatggctccacagcgtgattcagaaggtaggttacaagctgacccccagagattcccacatggcatacgtcagcttgcaaaccatgtacacagcaaaggtctaaagttaggcatctacgctgatgtcggaaacaagacatgtgctggtttcccaggttcattcggttactatgacatagatgcgcagacgtttgctgattggggtgttgatttgttgaagtttgatggatgctactgcgattccctggagaacctagccgatgggtacaaacacatgagtctggctctaaacaaaactggtaggccgatcgtctatagttgtgaatggcccttgtacatgtggccgtttcagaagccaaactacactgagataagacaatactgtaaccattggcgtaactttgctgacatagatgattcatgggcttcaatcaaatctatcttggattggacttctcgtaaccaggaaagaattgttgatgttgcaggtccaggtggatggaatgaccctgatatgcttgtcatagggaactttgggctatcatgggaccaacaagttacacaaatggctttgtgggcgatcatggccggccccctattcatgtctaatgatctacgtgcgataagcccccaagcaaaggctttacttcaagataaggatgtcatagcgatcaaccaagatcctcttggtaaacaaggttatcaattgagaaaaggtgacaactttgaagtgtgggaaagaccattgtctggagacgcgtgggctgttgctattatcaaccgtcaagagatcggagggccaagatcttacactatcccggtagcctctttgggtaagggtgttgcgtgcaatcctgcctgcttcattacacaattgcttccagttaagagaaaattgggtttctatgaagcaacctctaggctaagaagtcacattaatcctactggtacggtattgttgcaattggagaacacaatgcaaacctctttgaaagatttgttataa

SEQ ID NO: 264 - protein, 398 aa, Artificial Sequence
  variant of human alpha-galactosidase A
LDNGLARTPPMGWLHWERFMCNLDCQEEPDSCISEKLFEEMAERMVTDGWKDAGYEYLCIDDCWMAPQRDSEGRLQADPQRFPHGIRQLANHVHSKGLKLGIYADVGNKTCAGFPGSFGYYDIDAQTFADWGVDLLKFDGCYCDSLENLADGYKHMSLALNKTGRPIVYSCEWPLYMWPFQKPNYTEIRQYCNHWRNFADIDDSWASIKSILDWTSRNQERIVDVAGPGGWNDPDMLVIGNFGLSWDQQVTQMALWAIMAGPLFMSNDLRAISPQAKALLQDKDVIAINQDPLGKQGYQLRKGDNFEVWERPLSGDAWAVAIINRQEIGGPRSYTIPVASLGKGVACNPACFITQLLPVKRKLGFYEATSRLRSHINPTGTVLLQLENTMQTSLKDLL

SEQ ID NO: 265 - DNA, 1197 bp, Artificial Sequence
  variant of human alpha-galactosidase A
ttggataacgggttagcccgtacacctccgatgggttggcttcactgggaaagattcatgtgtaacttagattgccaagaagagcctgacagctgtatctcagagaaactattcgaagagatggctgaacggatggtaactgacggatggaaggatgctggttatgaatacctatgtattgatgattgctggatggctccagagcgtgattcagaaggtaggttacaagctgacccccagagattcccacatggcatacgtcagcttgcaaaccatgtacacagcaaaggtctaaagttaggcatctacgctgatgtcggaaacaagacatgtgctggtttcccaggttcattcggttactatgacatagatgcgcagacgtttgctgattggggtgttgatttgttgaagtttgatggatgctactgcgattccctggagaacctagccgatgggtacaaacacatgagtctggctctaaacaaaactggtaggccgatcgtctatagttgtgaatggcccttgtacatgtggccgtttcagaagccaaactacactgagataagacaatactgtaaccattggcgtaactttgctgacatagatgattcatgggcttcaatcaaatctatcttggattggacttctcgtaaccaggaaagaattgttgatgttgcaggtccaggtggatggaatgaccctgatatgcttgtcatagggaactttgggctatcatgggaccaacaagttacacaaatggctttgtgggcgatcatggccggccccctattcatgtctaatgatctacgtgcgataagcccccaagcaaaggctttacttcaagataaggatgtcatagcgatcaaccaagatcctcttggtaaacaaggttatcaattgagaaaaggtgacaactttgaagtgtgggaaagaccattgtctggagacgcgtgggctgttgctattatcaaccgtcaagagatcggagggccaagatcttacactatcccggtagcctctttgggtaagggtgttgcgtgcaatcctgcctgcttcattacacaattgcttccagttaagagaaaattgggtttctatgaagcaacctctaggctaagaagtcacattaatcctactggtacggtattgttgcaattggagaacacaatgcaaacctctttgaaagatttgttataa

SEQ ID NO: 266 - protein, 398 aa, Artificial Sequence
  variant of human alpha-galactosidase A
LDNGLARTPPMGWLHWERFMCNLDCQEEPDSCISEKLFEEMAERMVTDGWKDAGYEYLCIDDCWMAPERDSEGRLQADPQRFPHGIRQLANHVHSKGLKLGIYADVGNKTCAGFPGSFGYYDIDAQTFADWGVDLLKFDGCYCDSLENLADGYKHMSLALNKTGRPIVYSCEWPLYMWPFQKPNYTEIRQYCNHWRNFADIDDSWASIKSILDWTSRNQERIVDVAGPGGWNDPDMLVIGNFGLSWDQQVTQMALWAIMAGPLFMSNDLRAISPQAKALLQDKDVIAINQDPLGKQGYQLRKGDNFEVWERPLSGDAWAVAIINRQEIGGPRSYTIPVASLGKGVACNPACFITQLLPVKRKLGFYEATSRLRSHINPTGTVLLQLENTMQTSLKDLL

SEQ ID NO: 267 - DNA, 1197 bp, Artificial Sequence
  variant of human alpha-galactosidase A
ttggataacgggttagcccgtacacctccgatgggttggcttcactgggaaagattcatgtgtaacttagattgccaagaagagcctgacagctgtatctcagagaaactattcgaagagatggctgaacggatggtaactgacggatggaaggatgctggttatgaatacctatgtattgatgattgctggatggctccagagcgtgattcagaaggtaggttacaagctgacccccagagattcccacatggcatacgtcagcttgcaaaccatgtacacagcaaaggtctaaagttaggcatctacgctgatgtcggaaacaagacatgtgctggtttcccaggttcattcggttactatgacatagatgcgcagacgtttgctgattggggtgttgatttgttgaagtttgatggatgctactgcgattccctggagaacctagccgatgggtacaaacacatgagtctggctctaaacaaaactggtaggccgatcgtctatagttgtgaatggcccttgtacatgtggccgtttcagaagccaaactacactgagataagacaatactgtaaccattggcgtaactttgctgacatagatgattcatgggcttcaatcaaatctatcttggattggacttctaagaaccaggaaagaattgttgatgttgcaggtccaggtggatggaatgaccctgatatgcttgtcatagggaactttgggctatcatgggaccaacaagttacacaaatggctttgtgggcgatcatggccggccccctattcatgtctaatgatctacgtgcgataagcccccaagcaaaggctttacttcaagataaggatgtcatagcgatcaaccaagatcctcttggtaaacaaggttatcaattgagaaaaggtgacaactttgaagtgtgggaaagaccattgtctggagacgcgtgggctgttgctattatcaaccgtcaagagatcggagggccaagattctacactatcccggtagcctctttgggtaagggtgttgcgtgcaatcctgcctgcttcattacacaattgcttccagttaagagaaaattgggtttctatgaagcaacctctaggctaagaagtcacattaatcctactggtacggtattgttgcaattggagaacacaatggcgaccgtattgaaagatttgttataa

SEQ ID NO: 268 - protein, 398 aa, Artificial Sequence
  variant of human alpha-galactosidase A
LDNGLARTPPMGWLHWERFMCNLDCQEEPDSCISEKLFEEMAERMVTDGWKDAGYEYLCIDDCWMAPERDSEGRLQADPQRFPHGIRQLANHVHSKGLKLGIYADVGNKTCAGFPGSFGYYDIDAQTFADWGVDLLKFDGCYCDSLENLADGYKHMSLALNKTGRPIVYSCEWPLYMWPFQKPNYTEIRQYCNHWRNFADIDDSWASIKSILDWTSKNQERIVDVAGPGGWNDPDMLVIGNFGLSWDQQVTQMALWAIMAGPLFMSNDLRAISPQAKALLQDKDVIAINQDPLGKQGYQLRKGDNFEVWERPLSGDAWAVAIINRQEIGGPRFYTIPVASLGKGVACNPACFITQLLPVKRKLGFYEATSRLRSHINPTGTVLLQLENTMATVLKDLL

SEQ ID NO: 269 - DNA, 1197 bp, Artificial Sequence
  variant of human alpha-galactosidase A
ttggataacgggttagcccgtacacctccgatgggttggcttcactgggaaagattcatgtgtaacttagattgccaagaagagcctgacagctgtatctcagagaaactattcgaagagatggctgaacggatggtaactgacggatggaaggatgctggttatgaatacctatgtattgatgattgctggatggctccagagcgtgattcagaaggtaggttacaagctgacccccagagattcccacatggcatacgtcagcttgcaaaccatgtacacagcaaaggtctaaagttaggcatctacgctgatgtcggaaacaagacatgtgctggtttcccaggttcattcggttactatgacatagatgcgcagacgtttgctgattggggtgttgatttgttgaagtttgatggatgctactgcgattccctggagaacctagccgatgggtacaaacacatgagtctggctctaaacaaaactggtaggccgatcgtctatagttgtgaatggcccttgtacatgtggccgtttcagaagccaaactacactgagataagacaatactgtaaccattggcgtaactttgctgacatagatgattcatgggcttcaatcaaatctatcttggattggacttctcgtaaccaggaaagaattgttgatgttgcaggtccaggtggatggaatgaccctgatatgcttgtcatagggaactttgggctatcatgggaccaacaagttacacaaatggctttgtgggcgatcatggccggccccctattcatgtctaatgatctacgtgcgataagcccccaagcaaaggctttacttcaagataaggatgtcatagcgatcaaccaagatcctctgggtaaacaaggttatcaattgagaaaaggtgacaactttgaagtgtgggaaagaccattgtctggagacgcgtgggctgttgctattatcaaccgtcaagagatcggagggccaagattctacactatcccggtagcctctttgggtaagggtgttgcgtgcaatcctgcctgcttcattacacaattgcttccagttaagagaaaactgggtttctatgaagcaacctctaggctaagaagtcacattaatcctactggtacggtattgttgcaattggagaacacaatgcaaacctctttgaaagatttgttataa

SEQ ID NO: 270 - protein, 398 aa, Artificial Sequence
  variant of human alpha-galactosidase A
LDNGLARTPPMGWLHWERFMCNLDCQEEPDSCISEKLFEEMAERMVTDGWKDAGYEYLCIDDCWMAPERDSEGRLQADPQRFPHGIRQLANHVHSKGLKLGIYADVGNKTCAGFPGSFGYYDIDAQTFADWGVDLLKFDGCYCDSLENLADGYKHMSLALNKTGRPIVYSCEWPLYMWPFQKPNYTEIRQYCNHWRNFADIDDSWASIKSILDWTSRNQERIVDVAGPGGWNDPDMLVIGNFGLSWDQQVTQMALWAIMAGPLFMSNDLRAISPQAKALLQDKDVIAINQDPLGKQGYQLRKGDNFEVWERPLSGDAWAVAIINRQEIGGPRFYTIPVASLGKGVACNPACFITQLLPVKRKLGFYEATSRLRSHINPTGTVLLQLENTMQTSLKDLL

SEQ ID NO: 271 - DNA, 1197 bp, Artificial Sequence
  variant of human alpha-galactosidase A
ttggataacgggttagcccgtacacctccgatgggttggcttcactgggaaagattcatgtgtaacttagattgccaagaagagcctgacagctgtatctcagagaaactattcgaagagatggctgaacggatggtaactgacggatggaaggatgctggttatgaatacctatgtattgatgattgctggatggctccacagcgtgattcagaaggtaggttacaagctgacccccagagattcccacatggcatacgtcagcttgcaaaccatgtacacagcaaaggtctaaagttaggcatctacgctgatgtcggaaacaagacatgtgctggtttcccaggttcattcggttactatgacatagatgcgcagacgtttgctgattggggtgttgatttgttgaagtttgatggatgctactgcgattccctggagaacctagccgatgggtacaaacacatgagtctggctctaaacaaaactggtaggccgatcgtctatagttgtgaatggcccttgtacatgtggccgtttcagaagccaaactacactgagataagacaatactgtaaccattggcgtaactttgctgacatagatgattcatgggcttcaatcaaatctatcttggattggacttctaagaaccaggaaagaattgttgatgttgcaggtccaggtggatggaatgaccctgatatgcttgtcatagggaactttgggctatcatgggaccaacaagttacacaaatggctttgtgggcgatcatggccggccccctattcatgtctaatgatctacgtgcgataagcccccaagcaaaggctttacttcaagataaggatgtcatagcgatcaaccaagatcctcttggtaaacaaggttatcaattgagaaaaggtgacaactttgaagtgtgggaaagaccattgtctggagacgcgtgggctgttgctattatcaaccgtcaagagatcggagggccaagaagttacactatcccggtagcctctttgggtaagggtgttgcgtgcaatcctgcctgcttcattacacaattgcttccagttaagagaaaattgggtttctatgaagcaacctctaggctaagaagtcacattaatcctactggtacggtattgttgcaattggagaacacaatgcaaacctctttgaaagatttgttataa

SEQ ID NO: 272 - protein, 398 aa, Artificial Sequence
  variant of human alpha-galactosidase A
LDNGLARTPPMGWLHWERFMCNLDCQEEPDSCISEKLFEEMAERMVTDGWKDAGYEYLCIDDCWMAPQRDSEGRLQADPQRFPHGIRQLANHVHSKGLKLGIYADVGNKTCAGFPGSFGYYDIDAQTFADWGVDLLKFDGCYCDSLENLADGYKHMSLALNKTGRPIVYSCEWPLYMWPFQKPNYTEIRQYCNHWRNFADIDDSWASIKSILDWTSKNQERIVDVAGPGGWNDPDMLVIGNFGLSWDQQVTQMALWAIMAGPLFMSNDLRAISPQAKALLQDKDVIAINQDPLGKQGYQLRKGDNFEVWERPLSGDAWAVAIINRQEIGGPRSYTIPVASLGKGVACNPACFITQLLPVKRKLGFYEATSRLRSHINPTGTVLLQLENTMQTSLKDLL

SEQ ID NO: 273 - DNA, 1197 bp, Artificial Sequence
  variant of human alpha-galactosidase A
ttggataacgggttagcccgtacacctccgatgggttggcttcactgggaaagattcatgtgtaacttagattgccaagaagagcctgacagctgtatctcagagaaactattcgaagagatggctgaacggatggtaactgacggatggaaggatgctggttatgaatacctatgtattgatgattgctggatggctccacagcgtgattcagaaggtaggttacaagctgacccccagagattcccacatggcatacgtcagcttgcaaaccatgtacacagcaaaggtctaaagttaggcatctacgctgatgtcggaaacaagacatgtgctggtttcccaggttcattcggttactatgacatagatgcgcagacgtttgctgattggggtgttgatttgttgaagtttgatggatgctactgcgattccctggagaacctagccgatgggtacaaacacatgagtctggctctaaacaaaactggtaggccgatcgtctatagttgtgaatggcccttgtacatgtggccgtttcagaagccaaactacactgagataagacaatactgtaaccattggcgtaactttgctgacatagatgattcatgggcttcaatcaaatctatcttggattggacttctcgtaaccaggaaagaattgttgatgttgcaggtccaggtggatggaatgaccctgatatgcttgtcatagggaactttgggctatcatgggaccaacaagttacacaaatggctttgtgggcgatcatggccggccccctattcatgtctaatgatctacgtgcgataagcccccaagcaaaggctttacttcaagataaggatgtcatagcgatcaaccaagatcctcttggtaaacaaggttatcaattgagaaaaggtgacaactttgaagtgtgggaaagaccattgtctggagacgcgtgggctgttgctattatcaaccgtcaagagatcggagggccaagattctacactatcccggtagcctctttgggtaagggtgttgcgtgcaatcctgcctgcttcattacacaattgcttccagttaagagaaaattgggtttctatgaagcaacctctaggctaagaagtcacattaatcctactggtacggtattgttgcaattggagaacacaatgcaaacctctttgaaagatttgttataa

SEQ ID NO: 274 - protein, 398 aa, Artificial Sequence
  variant of human alpha-galactosidase A
LDNGLARTPPMGWLHWERFMCNLDCQEEPDSCISEKLFEEMAERMVTDGWKDAGYEYLCIDDCWMAPQRDSEGRLQADPQRFPHGIRQLANHVHSKGLKLGIYADVGNKTCAGFPGSFGYYDIDAQTFADWGVDLLKFDGCYCDSLENLADGYKHMSLALNKTGRPIVYSCEWPLYMWPFQKPNYTEIRQYCNHWRNFADIDDSWASIKSILDWTSRNQERIVDVAGPGGWNDPDMLVIGNFGLSWDQQVTQMALWAIMAGPLFMSNDLRAISPQAKALLQDKDVIAINQDPLGKQGYQLRKGDNFEVWERPLSGDAWAVAIINRQEIGGPRFYTIPVASLGKGVACNPACFITQLLPVKRKLGFYEATSRLRSHINPTGTVLLQLENTMQTSLKDLL

SEQ ID NO: 275 - DNA, 1197 bp, Artificial Sequence
  variant of human alpha-galactosidase A
ttggataacgggttagcccgtacacctccgatgggttggcttcactgggaaagattcatgtgtaacttagattgccaagaagagcctgacagctgtatctcagagaaactattcgaagagatggctgaacggatggtaactgacggatggaaggatgctggttatgaatacctatgtattgatgattgctggatggctccacagcgtgattcagaaggtaggttacaagctgacccccagagattcccacatggcatacgtcagcttgcaaaccatgtacacagcaaaggtctaaagttaggcatctacgctgatgtcggaaacaagacatgtgctggtttcccaggttcattcggttactatgacatagatgcgcagacgtttgctgattggggtgttgatttgttgaagtttgatggatgctactgcgattccctggagaacctagccgatgggtacaaacacatgagtctggctctaaacaaaactggtaggccgatcgtctatagttgtgaatggcccttgtacatgtggccgtttcagaagccaaactacactgagataagacaatactgtaaccattggcgtaactttgctgacatagatgattcatgggcttcaatcaaatctatcttggattggacttctcgtaaccaggaaagaattgttgatgttgcaggtccaggtggatggaatgaccctgatatgcttgtcatagggaactttgggctatcatgggaccaacaagttacacaaatggctttgtgggcgatcatggccggccccctattcatgtctaatgatctacgtgcgataagcccccaagcaaaggctttacttcaagataaggatgtcatagcgatcaaccaagatcctcttggtaaacaaggttatcaattgagaaaaggtgacaactttgaagtgtgggaaagaccattgtctggagacgcgtgggctgttgctattatcaaccgtcaagagatcggagggccaagaggttacactatcccggtagcctctttgggtaagggtgttgcgtgcaatcctgcctgcttcattacacaattgcttccagttaagagaaaattgggtttctatgaagcaacctctaggctaagaagtcacattaatcctactggtacggtattgttgcaattggagaacacaatgcaaacctctttgaaagatttgttataa

SEQ ID NO: 276 - protein, 398 aa, Artificial Sequence
  variant of human alpha-galactosidase A
LDNGLARTPPMGWLHWERFMCNLDCQEEPDSCISEKLFEEMAERMVTDGWKDAGYEYLCIDDCWMAPQRDSEGRLQADPQRFPHGIRQLANHVHSKGLKLGIYADVGNKTCAGFPGSFGYYDIDAQTFADWGVDLLKFDGCYCDSLENLADGYKHMSLALNKTGRPIVYSCEWPLYMWPFQKPNYTEIRQYCNHWRNFADIDDSWASIKSILDWTSRNQERIVDVAGPGGWNDPDMLVIGNFGLSWDQQVTQMALWAIMAGPLFMSNDLRAISPQAKALLQDKDVIAINQDPLGKQGYQLRKGDNFEVWERPLSGDAWAVAIINRQEIGGPRGYTIPVASLGKGVACNPACFITQLLPVKRKLGFYEATSRLRSHINPTGTVLLQLENTMQTSLKDLL

SEQ ID NO: 277 - DNA, 1197 bp, Artificial Sequence
  variant of human alpha-galactosidase A
ttggataacgggttagcccgtacacctccgatgggttggcttcactgggaaagattcatgtgtaacttagattgccaagaagagcctgacagctgtatctcagagaaactattcgaagagatggctgaacggatggtaactgacggatggaaggatgctggttatgaatacctatgtattgatgattgctggatggctccacagcgtgattcagaaggtaggttacaagctgacccccagagattcccacatggcatacgtcagcttgcaaaccatgtacacagcaaaggtctaaagttaggcatctacgctgatgtcggaaacaagacatgtgctggtttcccaggttcattcggttactatgacatagatgcgcagacgtttgctgattggggtgttgatttgttgaagtttgatggatgctactgcgattccctggagaacctagccgatgggtacaaacacatgagtctggctctaaacaaaactggtaggccgatcgtctatagttgtgaatggcccttgtacatgtggccgtttcagaagccaaactacactgagataagacaatactgtaaccattggcgtaactttgctgacatagatgattcatgggcttcaatcaaatctatcttggattggacttctcgtaaccaggaaagaattgttgatgttgcaggtccaggtggatggaatgaccctgatatgcttgtcatagggaactttgggctatcatgggaccaacaagttacacaaatggctttgtgggcgatcatggccggccccctattcatgtctaatgatctacgtgcgataagcccccaagcaaaggctttacttcaagataaggatgtcatagcgatcaaccaagatcctcttggtaaacaaggttatcaattgagaaaaggtgacaactttgaagtgtgggaaagaccattgtctggagacgcgtgggctgttgctattatcaaccgtcaagagatcggagggccaagaagttacactatcccggtagcctctttgggtaagggtgttgcgtgcaatcctgcctgcttcattacacaattgcttccagttaagagaaaattgggtttctatgaagcaacctctaggctaagaagtcacattaatcctactggtacggtattgttgcaattggagaacacaatgcagaccgtattgaaagatttgttataa

SEQ ID NO: 278 - protein, 398 aa, Artificial Sequence
  variant of human alpha-galactosidase A
LDNGLARTPPMGWLHWERFMCNLDCQEEPDSCISEKLFEEMAERMVTDGWKDAGYEYLCIDDCWMAPQRDSEGRLQADPQRFPHGIRQLANHVHSKGLKLGIYADVGNKTCAGFPGSFGYYDIDAQTFADWGVDLLKFDGCYCDSLENLADGYKHMSLALNKTGRPIVYSCEWPLYMWPFQKPNYTEIRQYCNHWRNFADIDDSWASIKSILDWTSRNQERIVDVAGPGGWNDPDMLVIGNFGLSWDQQVTQMALWAIMAGPLFMSNDLRAISPQAKALLQDKDVIAINQDPLGKQGYQLRKGDNFEVWERPLSGDAWAVAIINRQEIGGPRSYTIPVASLGKGVACNPACFITQLLPVKRKLGFYEATSRLRSHINPTGTVLLQLENTMQTVLKDLL

SEQ ID NO: 279 - DNA, 1197 bp, Artificial Sequence
  variant of human alpha-galactosidase A
ttggataacgggttagcccgtacacctccgatgggttggcttcactgggaaagattcatgtgtaacttagattgccaagaagagcctgacagctgtatctcagagaaactattcgaagagatggctgaacggatggtaactgacggatggaaggatgctggttatgaatacctatgtattgatgattgctggatggctccacagcgtgattcagaaggtaggttacaagctgacccccagagattcccacatggcatacgtcagcttgcaaaccatgtacacagcaaaggtctaaagttaggcatctacgctgatgtcggaaacaagacatgtgctggtttcccaggttcattcggttactatgacatagatgcgcagacgtttgctgattggggtgttgatttgttgaagtttgatggatgctactgcgattccctggagaacctagccgatgggtacaaacacatgagtctggctctaaacaaaactggtaggccgatcgtctatagttgtgaatggcccttgtacatgtggccgtttcagaagccaaactacactgagataagacaatactgtaaccattggcgtaactttgctgacatagatgattcatgggcttcaatcaaatctatcttggattggacttctcgtaaccaggaaagaattgttgatgttgcaggtccaggtggatggaatgaccctgatatgcttgtcatagggaactttgggctatcatgggaccaacaagttacacaaatggctttgtgggcgatcatggccggccccctattcatgtctaatgatctacgtgcgataagcccccaagcaaaggctttacttcaagataaggatgtcatagcgatcaaccaagatcctcttggtaaacaaggttatcaattgagaaaaggtgacaactttgaagtgtgggaaagaccattgtctggagacgcgtgggctgttgctattatcaaccgtcaagagatcggagggccaagatcttacactatcccggtagcctctttgggtaagggtcaagcgtgcaatcctgcctgcttcattacacaattgcttccagttaagagaaaattgggtttctatgaagcaacctctaggctaagaagtcacattaatcctactggtacggtattgttgcaattggagaacacaatgcagaccgtattgaaagatttgttataa

SEQ ID NO: 280 - protein, 398 aa, Artificial Sequence
  variant of human alpha-galactosidase A
LDNGLARTPPMGWLHWERFMCNLDCQEEPDSCISEKLFEEMAERMVTDGWKDAGYEYLCIDDCWMAPQRDSEGRLQADPQRFPHGIRQLANHVHSKGLKLGIYADVGNKTCAGFPGSFGYYDIDAQTFADWGVDLLKFDGCYCDSLENLADGYKHMSLALNKTGRPIVYSCEWPLYMWPFQKPNYTEIRQYCNHWRNFADIDDSWASIKSILDWTSRNQERIVDVAGPGGWNDPDMLVIGNFGLSWDQQVTQMALWAIMAGPLFMSNDLRAISPQAKALLQDKDVIAINQDPLGKQGYQLRKGDNFEVWERPLSGDAWAVAIINRQEIGGPRSYTIPVASLGKGQACNPACFITQLLPVKRKLGFYEATSRLRSHINPTGTVLLQLENTMQTVLKDLL

SEQ ID NO: 281 - DNA, 1197 bp, Artificial Sequence
  variant of human alpha-galactosidase A
ttggataacgggttagcccgtacacctccgatgggttggcttcactgggaaagattcatgtgtaacttagattgccaagaagagcctgacagctgtatctcagagaaactattcgaagagatggctgaacggatggtaactgaaggatggaaggatgctggttatgaatacctatgtattgatgattgctggatggctccagagcgtgattcagaaggtaggttacaagctgacccccagagattcccacatggcatacgtcagcttgcaaaccatgtacacagcaaaggtctaaagttaggcatctacgctgatgtcggaaacaagacatgtgctggtttcccaggttcattcggttactatgacatagatgcgcagacgtttgctgattggggtgttgatttgttgaagtttgatggatgctactgcgattccctggagaacctagccgatgggtacaaacacatgagtctggctctaaacaaaactggtaggccgatcgtctatagttgtgaatggcccttgtacatgtggccgtttcagaagccaaactacactgagataagacaatactgtaaccattggcgtaactttgctgacatagatgattcatgggcttcaatcaaatctatcttggattggacttctcgtaaccaggaaagaattgttgatgttgcaggtccaggtggatggaatgaccctgatatgcttgtcatagggaactttgggctatcatgggaccaacaagttacacaaatggctttgtgggcgatcatggccggccccctattcatgtctaatgatctacgtgcgataagcccccaagcaaaggctttacttcaagataaggatgtcatagcgatcaaccaagatcctcttggtaaacaaggttatcaattgagaaaaggtgacaactttgaagtgtgggaaagaccattgtctggagacgcgtgggctgttgctattatcaaccgtcaagagatcggagggccaagatcttacactatcccggtagcctctttgggtaagggtgttgcgtgcaatcctgcctgcttcattacacaattgcttccagttaagagaaaattgggtttctatgaagcaacctctaggctaagaagtcacattaatcctactggtacggtattgttgcaattggagaacacaatgcaaacctctttgaaagatttgttataa

SEQ ID NO: 282 - protein, 398 aa, Artificial Sequence
  variant of human alpha-galactosidase A
LDNGLARTPPMGWLHWERFMCNLDCQEEPDSCISEKLFEEMAERMVTEGWKDAGYEYLCIDDCWMAPERDSEGRLQADPQRFPHGIRQLANHVHSKGLKLGIYADVGNKTCAGFPGSFGYYDIDAQTFADWGVDLLKFDGCYCDSLENLADGYKHMSLALNKTGRPIVYSCEWPLYMWPFQKPNYTEIRQYCNHWRNFADIDDSWASIKSILDWTSRNQERIVDVAGPGGWNDPDMLVIGNFGLSWDQQVTQMALWAIMAGPLFMSNDLRAISPQAKALLQDKDVIAINQDPLGKQGYQLRKGDNFEVWERPLSGDAWAVAIINRQEIGGPRSYTIPVASLGKGVACNPACFITQLLPVKRKLGFYEATSRLRSHINPTGTVLLQLENTMQTSLKDLL

SEQ ID NO: 283 - DNA, 1197 bp, Artificial Sequence
  variant of human alpha-galactosidase A
ttggataacgggttagcccgtacacctccgatgggttggcttcactgggaaagattcatgtgtaacttagattgccaagaagagcctgacagctgtatctcagagaaactattcgaagagatggctgaacggatggtaactgaaggatggaaggatgctggttatgaatacctatgtattgatgattgctggatggctccagagcgtgattcagaaggtaggttacaagctgacccccagagattcccacatggcatacgtcagcttgcaaaccatgtacacagcaaaggtctaaagttaggcatctacgctgatgtcggaaacaagacatgtgctggtttcccaggttcattcggttactatgacatagatgcgcagacgtttgctgattggggtgttgatttgttgaagtttgatggatgctactgcgattccctggagaacctagccgatgggtacaaacacatgagtctggctctaaacaaaactggtaggccgatcgtctatagttgtgaatggcccttgtacatgtggccgtttcagaagccaaactacactgagataagacaatactgtaaccattggcgtaactttgctgacatagatgattcatgggcttcaatcaaatctatcttggattggacttctcgtaaccaggaaagaattgttgatgttgcaggtccaggtggatggaatgaccctgatatgcttgtcatagggaactttgggctatcatgggaccaacaagttacacaaatggctttgtgggcgatcatggccggccccctattcatgtctaatgatctacgtgcgataagcccccaagcaaaggctttacttcaagataaggatgtcatagcgatcaaccaagatcctcttggtaaacaaggttatcaattgagaaaaggtgacaactttgaagtgtgggaaagaccattgtctggagacgcgtgggctgttgctattatcaaccgtcaagagatcggagggccaagatcttacactatcccggtagcctctttgggtaagggtcaagcgtgcaatcctgcctgcttcattacacaattgcttccagttaagagaaaattgggtttctatgaagcaacctctaggctaagaagtcacattaatcctactggtacggtattgttgcaattggagaacacaatgcaaacctctttgaaagatttgttataa

SEQ ID NO: 284 - protein, 398 aa, Artificial Sequence
  variant of human alpha-galactosidase A
LDNGLARTPPMGWLHWERFMCNLDCQEEPDSCISEKLFEEMAERMVTEGWKDAGYEYLCIDDCWMAPERDSEGRLQADPQRFPHGIRQLANHVHSKGLKLGIYADVGNKTCAGFPGSFGYYDIDAQTFADWGVDLLKFDGCYCDSLENLADGYKHMSLALNKTGRPIVYSCEWPLYMWPFQKPNYTEIRQYCNHWRNFADIDDSWASIKSILDWTSRNQERIVDVAGPGGWNDPDMLVIGNFGLSWDQQVTQMALWAIMAGPLFMSNDLRAISPQAKALLQDKDVIAINQDPLGKQGYQLRKGDNFEVWERPLSGDAWAVAIINRQEIGGPRSYTIPVASLGKGQACNPACFITQLLPVKRKLGFYEATSRLRSHINPTGTVLLQLENTMQTSLKDLL

SEQ ID NO: 285 - DNA, 1197 bp, Artificial Sequence
  variant of human alpha-galactosidase A
ttggataacgggttagcccgtacacctccgatgggttggcttcactgggaaagattcatgtgtaacttagattgccaagaagagcctgacagctgtatctcagagaaactattcgaagagatggctgaacggatggtaactgaaggatggaaggatgctggttatgaatacctatgtattgatgattgctggatggctccacagcgtgattcagaaggtaggttacaagctgacccccagagattcccacatggcatacgtcagcttgcaaaccatgtacacagcaaaggtctaaagttaggcatctacgctgatgtcggaaacaagacatgtgctggtttcccaggttcattcggttactatgacatagatgcgcagacgtttgctgattggggtgttgatttgttgaagtttgatggatgctactgcgattccctggagaacctagccgatgggtacaaacacatgagtctggctctaaacaaaactggtaggccgatcgtctatagttgtgaatggcccttgtacatgtggccgtttcagaagccaaactacactgagataagacaatactgtaaccattggcgtaactttgctgacatagatgattcatgggcttcaatcaaatctatcttggattggacttctaagaaccaggaaagaattgttgatgttgcaggtccaggtggatggaatgaccctgatatgcttgtcatagggaactttgggctatcatgggaccaacaagttacacaaatggctttgtgggcgatcatggccggccccctattcatgtctaatgatctacgtgcgataagcccccaagcaaaggctttacttcaagataaggatgtcatagcgatcaaccaagatcctcttggtaaacaaggttatcaattgagaaaaggtgacaactttgaagtgtgggaaagaccattgtctggagacgcgtgggctgttgctattatcaaccgtcaagagatcggagggccaagattctacactatcccggtagcctctttgggtaagggtgttgcgtgcaatcctgcctgcttcattacacaattgcttccagttaagagaaaattgggtttctatgaagcaacctctaggctaagaagtcacattaatcctactggtacggtattgttgcaattggagaacacaatgcaaacctctttgaaagatttgttataa

SEQ ID NO: 286 - protein, 398 aa, Artificial Sequence
  variant of human alpha-galactosidase A
LDNGLARTPPMGWLHWERFMCNLDCQEEPDSCISEKLFEEMAERMVTEGWKDAGYEYLCIDDCWMAPQRDSEGRLQADPQRFPHGIRQLANHVHSKGLKLGIYADVGNKTCAGFPGSFGYYDIDAQTFADWGVDLLKFDGCYCDSLENLADGYKHMSLALNKTGRPIVYSCEWPLYMWPFQKPNYTEIRQYCNHWRNFADIDDSWASIKSILDWTSKNQERIVDVAGPGGWNDPDMLVIGNFGLSWDQQVTQMALWAIMAGPLFMSNDLRAISPQAKALLQDKDVIAINQDPLGKQGYQLRKGDNFEVWERPLSGDAWAVAIINRQEIGGPRFYTIPVASLGKGVACNPACFITQLLPVKRKLGFYEATSRLRSHINPTGTVLLQLENTMQTSLKDLL

SEQ ID NO: 287 - DNA, 1197 bp, Artificial Sequence
  variant of human alpha-galactosidase A
ttggataacgggttagcccgtacacctccgatgggttggcttcactgggaaagattcatgtgtaacttagattgccaagaagagcctgacagctgtatctcagagaaactattcgaagagatggctgaacggatggtaactgaaggatggaaggatgctggttatgaatacctatgtattgatgattgctggatggctccacagcgtgattcagaaggtaggttacaagctgacccccagagattcccacatggcatacgtcagcttgcaaaccatgtacacagcaaaggtctaaagttaggcatctacgctgatgtcggaaacaagacatgtgctggtttcccaggttcattcggttactatgacatagatgcgcagacgtttgctgattggggtgttgatttgttgaagtttgatggatgctactgcgattccctggagaacctagccgatgggtacaaacacatgagtctggctctaaacaaaactggtaggccgatcgtctatagttgtgaatggcccttgtacatgtggccgtttcagaagccaaactacactgagataagacaatactgtaaccattggcgtaactttgctgacatagatgattcatgggcttcaatcaaatctatcttggattggacttctaagaaccaggaaagaattgttgatgttgcaggtccaggtggatggaatgaccctgatatgcttgtcatagggaactttgggctatcatgggaccaacaagttacacaaatggctttgtgggcgatcatggccggccccctattcatgtctaatgatctacgtgcgataagcccccaagcaaaggctttacttcaagataaggatgtcatagcgatcaaccaagatcctcttggtaaacaaggttatcaattgagaaaaggtgacaactttgaagtgtgggaaagaccattgtctggagacgcgtgggctgttgctattatcaaccgtcaagagatcggagggccaagaggttacactatcccggtagcctctttgggtaagggtgttgcgtgcaatcctgcctgcttcattacacaattgcttccagttaagagaaaattgggtttctatgaagcaacctctaggctaagaagtcacattaatcctactggtacggtattgttgcaattggagaacacaatgcagaccagcttgaaagatttgttataa

SEQ ID NO: 288 - protein, 398 aa, Artificial Sequence
  variant of human alpha-galactosidase A
LDNGLARTPPMGWLHWERFMCNLDCQEEPDSCISEKLFEEMAERMVTEGWKDAGYEYLCIDDCWMAPQRDSEGRLQADPQRFPHGIRQLANHVHSKGLKLGIYADVGNKTCAGFPGSFGYYDIDAQTFADWGVDLLKFDGCYCDSLENLADGYKHMSLALNKTGRPIVYSCEWPLYMWPFQKPNYTEIRQYCNHWRNFADIDDSWASIKSILDWTSKNQERIVDVAGPGGWNDPDMLVIGNFGLSWDQQVTQMALWAIMAGPLFMSNDLRAISPQAKALLQDKDVIAINQDPLGKQGYQLRKGDNFEVWERPLSGDAWAVAIINRQEIGGPRGYTIPVASLGKGVACNPACFITQLLPVKRKLGFYEATSRLRSHINPTGTVLLQLENTMQTSLKDLL

SEQ ID NO: 289 - DNA, 1197 bp, Artificial Sequence
  variant of human alpha-galactosidase A
ttggataacgggttagcccgtacacctccgatgggttggcttcactgggaaagattcatgtgtaacttagattgccaagaagagcctgacagctgtatctcagagaaactattcgaagagatggctgaacggatggtaactgaaggatggaaggatgctggttatgaatacctatgtattgatgattgctggatggctccacagcgtgattcagaaggtaggttacaagctgacccccagagattcccacatggcatacgtcagcttgcaaaccatgtacacagcaaaggtctaaagttaggcatctacgctgatgtcggaaacaagacatgtgctggtttcccaggttcattcggttactatgacatagatgcgcagacgtttgctgattggggtgttgatttgttgaagtttgatggatgctactgcgattccctggagaacctagccgatgggtacaaacacatgagtctggctctaaacaaaactggtaggccgatcgtctatagttgtgaatggcccttgtacatgtggccgtttcagaagccaaactacactgagataagacaatactgtaaccattggcgtaactttgctgacatagatgattcatgggcttcaatcaaatctatcttggattggacttctcgtaaccaggaaagaattgttgatgttgcaggtccaggtggatggaatgaccctgatatgcttgtcatagggaactttgggctatcatgggaccaacaagttacacaaatggctttgtgggcgatcatggccggccccctattcatgtctaatgatctacgtgcgataagcccccaagcaaaggctttacttcaagataaggatgtcatagcgatcaaccaagatcctcttggtaaacaaggttatcaattgagaaaaggtgacaactttgaagtgtgggaaagaccattgtctggagacgcgtgggctgttgctattatcaaccgtcaagagatcggagggccaagattctacactatcccggtagcctctttgggtaagggtcaagcgtgcaatcctgcctgcttcattacacaattgcttccagttaagagaaaattgggtttctatgaagcaacctctaggctaagaagtcacattaatcctactggtacggtattgttgcaattggagaacacaatgcaaacctctttgaaagatttgttataa

SEQ ID NO: 290 - protein, 398 aa, Artificial Sequence
  variant of human alpha-galactosidase A
LDNGLARTPPMGWLHWERFMCNLDCQEEPDSCISEKLFEEMAERMVTEGWKDAGYEYLCIDDCWMAPQRDSEGRLQADPQRFPHGIRQLANHVHSKGLKLGIYADVGNKTCAGFPGSFGYYDIDAQTFADWGVDLLKFDGCYCDSLENLADGYKHMSLALNKTGRPIVYSCEWPLYMWPFQKPNYTEIRQYCNHWRNFADIDDSWASIKSILDWTSRNQERIVDVAGPGGWNDPDMLVIGNFGLSWDQQVTQMALWAIMAGPLFMSNDLRAISPQAKALLQDKDVIAINQDPLGKQGYQLRKGDNFEVWERPLSGDAWAVAIINRQEIGGPRFYTIPVASLGKGQACNPACFITQLLPVKRKLGFYEATSRLRSHINPTGTVLLQLENTMQTSLKDLL

SEQ ID NO: 291 - DNA, 1197 bp, Artificial Sequence
  variant of human alpha-galactosidase A
ttggataacgggttagcccgtacacctccgatgggttggcttcactgggaaagattcatgtgtaacttagattgccaagaagagcctgacagctgtatctcagagaaactattcgaagagatggctgaacggatggtaactgaaggatggaaggatgctggttatgaatacctatgtattgatgattgctggatggctccacagcgtgattcagaaggtaggttacaagctgacccccagagattcccacatggcatacgtcagcttgcaaaccatgtacacagcaaaggtctaaagttaggcatctacgctgatgtcggaaacaagacatgtgctggtttcccaggttcattcggttactatgacatagatgcgcagacgtttgctgattggggtgttgatttgttgaagtttgatggatgctactgcgattccctggagaacctagccgatgggtacaaacacatgagtctggctctaaacaaaactggtaggccgatcgtctatagttgtgaatggcccttgtacatgtggccgtttcagaagccaaactacactgagataagacaatactgtaaccattggcgtaactttgctgacatagatgattcatgggcttcaatcaaatctatcttggattggacttctcgtaaccaggaaagaattgttgatgttgcaggtccaggtggatggaatgaccctgatatgcttgtcatagggaactttgggctatcatgggaccaacaagttacacaaatggctttgtgggcgatcatggccggccccctattcatgtctaatgatctacgtgcgataagcccccaagcaaaggctttacttcaagataaggatgtcatagcgatcaaccaagatcctcttggtaaacaaggttatcaattgagaaaaggtgacaactttgaagtgtgggaaagaccattgtctggagacgcgtgggctgttgctattatcaaccgtcaagagatcggagggccaagaggttacactatcccggtagcctctttgggtaagggtgttgcgtgcaatcctgcctgcttcattacacaattgcttccagttaagagaaaattgggtttctatgaagcaacctctaggctaagaagtcacattaatcctactggtacggtattgttgcaattggagaacacaatgcaaacctctttgaaagatttgttataa

SEQ ID NO: 292 - protein, 398 aa, Artificial Sequence
  variant of human alpha-galactosidase A
LDNGLARTPPMGWLHWERFMCNLDCQEEPDSCISEKLFEEMAERMVTEGWKDAGYEYLCIDDCWMAPQRDSEGRLQADPQRFPHGIRQLANHVHSKGLKLGIYADVGNKTCAGFPGSFGYYDIDAQTFADWGVDLLKFDGCYCDSLENLADGYKHMSLALNKTGRPIVYSCEWPLYMWPFQKPNYTEIRQYCNHWRNFADIDDSWASIKSILDWTSRNQERIVDVAGPGGWNDPDMLVIGNFGLSWDQQVTQMALWAIMAGPLFMSNDLRAISPQAKALLQDKDVIAINQDPLGKQGYQLRKGDNFEVWERPLSGDAWAVAIINRQEIGGPRGYTIPVASLGKGVACNPACFITQLLPVKRKLGFYEATSRLRSHINPTGTVLLQLENTMQTSLKDLL

SEQ ID NO: 293 - DNA, 1197 bp, Artificial Sequence
  variant of human alpha-galactosidase A
ttggataacgggttagcccgtacacctccgatgggttggcttcactgggaaagattcatgtgtaacttagattgccaagaagagcctgacagctgtatctcagagaaactattcgaagagatggctgaacggatggtaactgaaggatggaaggatgctggttatgaatacctatgtattgatgattgctggatggctccacagcgtgattcagaaggtaggttacaagctgacccccagagattcccacatggcatacgtcagcttgcaaaccatgtacacagcaaaggtctaaagttaggcatctacgctgatgtcggaaacaagacatgtgctggtttcccaggttcattcggttactatgacatagatgcgcagacgtttgctgagtggggtgttgatttgttgaagtttgatggatgctactgcgattccctggagaacctagccgatgggtacaaacacatgagtctggctctaaacaaaactggtaggccgatcgtctatagttgtgaatggcccttgtacatgtggccgtttcagaagccaaactacactgagataagacaatactgtaaccattggcgtaactttgctgacatagatgattcatgggcttcaatcaaatctatcttggattggacttctcgtaaccaggaaagaattgttgatgttgcaggtccaggtggatggaatgaccctgatatgcttgtcatagggaactttgggctatcatgggaccaacaagttacacaaatggctttgtgggcgatcatggccggccccctattcatgtctaatgatctacgtgcgataagcccccaagcaaaggctttacttcaagataaggatgtcatagcgatcaaccaagatcctcttggtaaacaaggttatcaattgagaaaaggtgacaactttgaagtgtgggaaagaccattgtctggagacgcgtgggctgttgctattatcaaccgtcaagagatcggagggccaagatcttacactatcccggtagcctctttgggtaagggtgttgcgtgcaatcctgcctgcttcattacacaattgcttccagttaagagaaaattgggtttctatgaagcaacctctaggctaagaagtcacattaatcctactggtacggtattgttgcaattggagaacacaatgcaaacctctttgaaagatttgttataa

SEQ ID NO: 294 - protein, 398 aa, Artificial Sequence
  variant of human alpha-galactosidase A
LDNGLARTPPMGWLHWERFMCNLDCQEEPDSCISEKLFEEMAERMVTEGWKDAGYEYLCIDDCWMAPQRDSEGRLQADPQRFPHGIRQLANHVHSKGLKLGIYADVGNKTCAGFPGSFGYYDIDAQTFAEWGVDLLKFDGCYCDSLENLADGYKHMSLALNKTGRPIVYSCEWPLYMWPFQKPNYTEIRQYCNHWRNFADIDDSWASIKSILDWTSRNQERIVDVAGPGGWNDPDMLVIGNFGLSWDQQVTQMALWAIMAGPLFMSNDLRAISPQAKALLQDKDVIAINQDPLGKQGYQLRKGDNFEVWERPLSGDAWAVAIINRQEIGGPRSYTIPVASLGKGVACNPACFITQLLPVKRKLGFYEATSRLRSHINPTGTVLLQLENTMQTSLKDLL

SEQ ID NO: 295 - DNA, 1197 bp, Artificial Sequence
  variant of human alpha-galactosidase A
ttggataacgggttagcccgtacacctccgatgggttggcttcactgggaaagattcatgtgtaacttagattgccaagaagagcctgacagctgtatctcagagaaactattcgaggagatggctgaacggatggtaactgaaggatggaaggatgctggttatgaatacctatgtattgatgattgctggatggctccacagcgtgattcagaaggtaggttacaagctgacccccagagattcccacatggcatacgtcagcttgcaaaccatgtacacagcaaaggtctaaagttaggcatctacgctgatgtcggaaacaagacatgtgctggtttcccaggttcattcggttactatgacatagatgcgcagacgtttgctgattggggtgttgatttgttgaagtttgatggatgctactgcgattccctggagaacctagccctggggtacaaacacatgagtctggctctaaacaaaactggtaggccgatcgtctatagttgtgaatggcccttgtacatgtggccgtttcagaagccaaactacactgagataagacaatactgtaaccattggcgtaactttgctgacatagatgattcatggtcgtcaatcaaatctatcttggattggacttctcgtaaccaggaaagaattgttgatgttgcaggtccaggtggatggaatgaccctgatatgcttgtcatagggaactttgggctatcatgggaccaacaagttacacaaatggctttgtgggcgatcatggccggccccctattcatgtctaatgatctacgtgcgataagcccccaagcaaaggctttacttcaaaacaaggatgtcatagcgatcaaccaagatcctcttggtaaacaaggttatcaattgcgtaaaggtgacaactttgaagtgtgggaaagaccattgtctggagacgcgtgggctgttgctattatcaaccgtcaagagatcggagggccaagatcttacactatccgtgtagcctctttgggtgatggtcaggcgtgcaatcctgcctgcttcattacacaattgcttccagttaagagaaaattgggtttctatgaagcaacctctaggctaagaagtcacattaatcctactggtacggtattgttgcaattggagaacacaatgcaaaccagcttgaaagatttggcgtaa

SEQ ID NO: 296 - protein, 398 aa, Artificial Sequence
  variant of human alpha-galactosidase A
LDNGLARTPPMGWLHWERFMCNLDCQEEPDSCISEKLFEEMAERMVTEGWKDAGYEYLCIDDCWMAPQRDSEGRLQADPQRFPHGIRQLANHVHSKGLKLGIYADVGNKTCAGFPGSFGYYDIDAQTFADWGVDLLKFDGCYCDSLENLALGYKHMSLALNKTGRPIVYSCEWPLYMWPFQKPNYTEIRQYCNHWRNFADIDDSWSSIKSILDWTSRNQERIVDVAGPGGWNDPDMLVIGNFGLSWDQQVTQMALWAIMAGPLFMSNDLRAISPQAKALLQNKDVIAINQDPLGKQGYQLRKGDNFEVWERPLSGDAWAVAIINRQEIGGPRSYTIRVASLGDGQACNPACFITQLLPVKRKLGFYEATSRLRSHINPTGTVLLQLENTMQTSLKDLA

SEQ ID NO: 297 - DNA, 1197 bp, Artificial Sequence
  variant of human alpha-galactosidase A
ttggataacgggttagcccgtacacctccgatgggttggcttcactgggaaagattcatgtgtaacttagattgccaagaagagcctgacagctgtatctcagagaaactattcgaggagatggctgaacggatggtaactgaaggatggaaggatgctggttatgaatacctatgtattgatgattgctggatggctccacagcgtgattcagaaggtaggttacaagctgacccccagagattcccacatggcatacgtcagcttgcaaaccatgtacacagcaaaggtctaaagttaggcatctacgctgatgtcggaaacaagacatgtgctggtttcccaggttcattcggttactatgacatagatgcgcagacgtttgctgagtggggtgttgatttgttgaagtttgatggatgctactgcgattccctggagaacctagccgatgggtacaaacacatgagtctggctctaaacaaaactggtaggccgatcgtctatagttgtgaatggcccttgtacatgtggccgtttcagaagccaaactacactgagataagacaatactgtaaccattggcgtaactttgctgacatagatgattcatgggcgtcaatcaaatctatcttggattggacttctcgtaaccaggaaagaattgttgatgttgcaggtccaggtggatggaatgaccctgatatgcttgtcatagggaactttgggctatcatgggaccaacaagttacacaaatggctttgtgggcgatcatggccggccccctattcatgtctaatgatctacgtgcgataagcccccaagcaaaggctttacttcaagataaggatgtcatagcgatcaaccaagatcctcttggtaaacaaggttatcaattgagaaaaggtgacaactttgaagtgtgggaaagaccattgtctggagacgcgtgggctgttgctattatcaaccgtcaagagatcggagggccaagatcttacactatccctgtagcctctttgggtaagggtcaggcgtgcaatcctgcctgcttcattacacaattgcttccagttaagagaaaattgggtttctatgaagcaacctctaggctaagaagtcacattaatcctactggtacggtattgttgcaattggagaacacaatgcaaaccgtattgaaagatttgctgtaa

SEQ ID NO: 298 - protein, 398 aa, Artificial Sequence
  variant of human alpha-galactosidase A
LDNGLARTPPMGWLHWERFMCNLDCQEEPDSCISEKLFEEMAERMVTEGWKDAGYEYLCIDDCWMAPQRDSEGRLQADPQRFPHGIRQLANHVHSKGLKLGIYADVGNKTCAGFPGSFGYYDIDAQTFAEWGVDLLKFDGCYCDSLENLADGYKHMSLALNKTGRPIVYSCEWPLYMWPFQKPNYTEIRQYCNHWRNFADIDDSWASIKSILDWTSRNQERIVDVAGPGGWNDPDMLVIGNFGLSWDQQVTQMALWAIMAGPLFMSNDLRAISPQAKALLQDKDVIAINQDPLGKQGYQLRKGDNFEVWERPLSGDAWAVAIINRQEIGGPRSYTIPVASLGKGQACNPACFITQLLPVKRKLGFYEATSRLRSHINPTGTVLLQLENTMQTVLKDLL

SEQ ID NO: 299 - DNA, 1197 bp, Artificial Sequence
  variant of human alpha-galactosidase A
ttggataacgggttagcccgtacacctccgatgggttggcttcactgggaaagattcatgtgtaacttagattgccaagaagagcctgacagctgtatctcagagaaactattcgtggagatggctgaacggatggtaactgaaggatggaaggatgctggttatgaatacctatgtattgatgattgctggatggctccacagcgtgattcagaaggtaggttacaagctgacccccagagattcccacatggcatacgtcagcttgcaaaccatgtacacagcaaaggtctaaagttaggcatctacgctgatgtcggaaacaagacatgtgctggtttcccaggttcattcggttactatgacatagatgcgcagacgtttgctgattggggtgttgatttgttgaagtttgatggatgctactgcgattccctggagaacctagccgatgggtacaaacacatgagtctggctctaaacaaaactggtaggccgatcgtctatagttgtgaatggcccttgtacatgtggccgtttcagaagccaaactacactgagataagacaatactgtaaccattggcgtaactttgctgacatagatgattcatgggcgtcaatcaaatctatcttggattggacttctcgtaaccaggaaagaattgttgatgttgcaggtccaggtggatggaatgaccctgatatgcttgtcatagggaactttgggctatcatgggaccaacaagttacacaaatggctttgtgggcgatcatggccggccccctattcatgtctaatgatctacgtgcgataagcccccaagcaaaggctttacttcaagataaggatgtcatagcgatcaaccaagatcctcttggtaaacaaggttatcaattgagaaaaggtgacaactttgaagtgtgggaaagaccattgtctggagacgcgtgggctgttgctattatcaaccgtcaagagatcggagggccaagatcttacactatccgtgtagcctctttgggtggtggtgtcgcgtgcaatcctgcctgcttcattacacaattgcttccagttaagagaaaattgggtttctatgaagcaacctctaggctaagaagtcacattaatcctactggtacggtattgttgcaattggagaacacaatgcaaacctctttgaaagatttggcgtaa

SEQ ID NO: 300 - protein, 398 aa, Artificial Sequence
  variant of human alpha-galactosidase A
LDNGLARTPPMGWLHWERFMCNLDCQEEPDSCISEKLFVEMAERMVTEGWKDAGYEYLCIDDCWMAPQRDSEGRLQADPQRFPHGIRQLANHVHSKGLKLGIYADVGNKTCAGFPGSFGYYDIDAQTFADWGVDLLKFDGCYCDSLENLADGYKHMSLALNKTGRPIVYSCEWPLYMWPFQKPNYTEIRQYCNHWRNFADIDDSWASIKSILDWTSRNQERIVDVAGPGGWNDPDMLVIGNFGLSWDQQVTQMALWAIMAGPLFMSNDLRAISPQAKALLQDKDVIAINQDPLGKQGYQLRKGDNFEVWERPLSGDAWAVAIINRQEIGGPRSYTIRVASLGGGVACNPACFITQLLPVKRKLGFYEATSRLRSHINPTGTVLLQLENTMQTSLKDLA

SEQ ID NO: 301 - DNA, 1197 bp, Artificial Sequence
  variant of human alpha-galactosidase A
ttggataacgggttagcccgtacacctccgatgggttggcttcactgggaaagattcatgtgtaacttagattgccaagaagagcctgacagctgtatctcagagaaactattcgaagagatggctgaacggatggtagttgaaggatggaaggatgctggttatgaatacctatgtattgatgattgctggatggctccacagcgtgattcagaaggtaggttacaagctgacccccagagattcccacatggcatacgtcagcttgcaaaccatgtacacagcaaaggtctaaagttaggcatctacgctgatgtcggaaacaagacatgtgctggtttcccaggttcattcggttactatgacatagatgcgcagacgtttgctgattggggtgttgatttgttgaagtttgatggatgctactgcgattccctggagaacctagccctggggtacaaacacatgagtctggctctaaacaaaactggtaggccgatcgtctatagttgtgaatggcccttgtacatgtggccgtttcagaagccaaactacactgagataagacaatactgtaaccattggcgtaactttgctgacatagatgattcatgggcttcaatcaaatctatcttggattggacttctcgtaaccaggaaagaattgttgatgttgcaggtccaggtggatggaatgaccctgatatgcttgtcatagggaactttgggctatcatgggaccaacaagttacacaaatggctttgtgggcgatcatggccggccccctattcatgtctaatgatctacgtgcgataagcccccaagcaaaggctttacttcaagataaggatgtcatagcgatcaaccaagatcctcttggtaaacaaggttatcaattgcgtaaaggtgacaactttgaagtgtgggaaagaccattgtctggagacgcgtgggctgttgctattatcaaccgtcaagagatcggagggccaagatcttacactatcccggtagcctctttgggtaagggtgttgcgtgcaatcctgcctgcttcattacacaattgcttccagttaagagaaaattgggtttctatgaagcaacctctaggctaagaagtcacattaatcctactggtacggtattgttgcaattggagaacacaatgcaaacctctttgaaagatttgttataa

SEQ ID NO: 302 - protein, 398 aa, Artificial Sequence
  variant of human alpha-galactosidase A
LDNGLARTPPMGWLHWERFMCNLDCQEEPDSCISEKLFEEMAERMVVEGWKDAGYEYLCIDDCWMAPQRDSEGRLQADPQRFPHGIRQLANHVHSKGLKLGIYADVGNKTCAGFPGSFGYYDIDAQTFADWGVDLLKFDGCYCDSLENLALGYKHMSLALNKTGRPIVYSCEWPLYMWPFQKPNYTEIRQYCNHWRNFADIDDSWASIKSILDWTSRNQERIVDVAGPGGWNDPDMLVIGNFGLSWDQQVTQMALWAIMAGPLFMSNDLRAISPQAKALLQDKDVIAINQDPLGKQGYQLRKGDNFEVWERPLSGDAWAVAIINRQEIGGPRSYTIPVASLGKGVACNPACFITQLLPVKRKLGFYEATSRLRSHINPTGTVLLQLENTMQTSLKDLL

SEQ ID NO: 303 - DNA, 1197 bp, Artificial Sequence
  variant of human alpha-galactosidase A
ttggataacgggttagcccgtacacctccgatgggttggcttcactgggaaagattcatgtgtaacttagattgccaagaagagcctgacagctgtatctcagagaaactattcgaagagatggctgaacggatggtagttgaaggatggaaggatgctggttatgaatacctatgtattgatgattgctggatggctccacagcgtgattcagaaggtaggttacaagctgacccccagagattcccacatggcatacgtcagcttgcaaaccatgtacacagcaaaggtctaaagttaggcatctacgctgatgtcggaaacaagacatgtgctggtttcccaggttcattcggttactatgacatagatgcgcagacgtttgctgagtggggtgttgatttgttgaagtttgatggatgctactgcgattccctggagaacctagccgatgggtacaaacacatgagtctggctctaaacaaaactggtaggccgatcgtctatagttgtgaatggcccttgtacatgtggccgtttcagaagccaaactacactgagataagacaatactgtaaccattggcgtaactttgctgacatagatgattcatgggcttcaatcaaatctatcttggattggacttctcgtaaccaggaaagaattgttgatgttgcaggtccaggtggatggaatgaccctgatatgcttgtcatagggaactttgggctatcatgggaccaacaagttacacaaatggctttgtgggcgatcatggccggccccctattcatgtctaatgatctacgtgcgataagcccccaagcaaaggctttacttcaagataaggatgtcatagcgatcaaccaagatcctcttggtaaacaaggttatcaattgagaaaaggtgacaactttgaagtgtgggaaagaccattgtctggagacgcgtgggctgttgctattatcaaccgtcaagagatcggagggccaagatcttacactatcccggtagcctctttgggtaagggtgttgcgtgcaatcctgcctgcttcattacacaattgcttccagttaagagaaaattgggtttctatgaagcaacctctaggctaagaagtcacattaatcctactggtacggtattgttgcaattggagaacacaatgcaaacctctttgaaagatttgttataa

SEQ ID NO: 304 - protein, 398 aa, Artificial Sequence
  variant of human alpha-galactosidase A
LDNGLARTPPMGWLHWERFMCNLDCQEEPDSCISEKLFEEMAERMVVEGWKDAGYEYLCIDDCWMAPQRDSEGRLQADPQRFPHGIRQLANHVHSKGLKLGIYADVGNKTCAGFPGSFGYYDIDAQTFAEWGVDLLKFDGCYCDSLENLADGYKHMSLALNKTGRPIVYSCEWPLYMWPFQKPNYTEIRQYCNHWRNFADIDDSWASIKSILDWTSRNQERIVDVAGPGGWNDPDMLVIGNFGLSWDQQVTQMALWAIMAGPLFMSNDLRAISPQAKALLQDKDVIAINQDPLGKQGYQLRKGDNFEVWERPLSGDAWAVAIINRQEIGGPRSYTIPVASLGKGVACNPACFITQLLPVKRKLGFYEATSRLRSHINPTGTVLLQLENTMQTSLKDLL

SEQ ID NO: 305 - DNA, 1197 bp, Artificial Sequence
  variant of human alpha-galactosidase A
ttggataacgggttagcccgtacacctccgatgggttggcttcactgggaaagattcatgtgtaacttagattgccaagaagagcctgacagctgtatctcagagaaactattcgaagagatggctgaacggatggtagttgaaggatggaaggatgctggttatgaatacctatgtattgatgattgctggatggctccacagcgtgattcagaaggtaggttacaagctgacccccagagattcccacatggcatacgtcagcttgcaaaccatgtacacagcaaaggtctaaagttaggcatctacgctgatgtcggaaacaagacatgtgctggtttcccaggttcattcggttactatgacatagatgcgcagacgtttgctgattggggtgttgatttgttgaagtttgatggatgctactgcgattccctggagaacctagccgatgggtacaaacacatgagtctggctctaaacaaaactggtaggccgatcgtctatagttgtgaatggcccttgtacatgtggccgtttcagaagccaaactacactgagataagacaatactgtaaccattggcgtaactttgctgacatagatgattcatgggcttcaatcaaatctatcttggattggacttctcgtaaccaggaaagaattgttgatgttgcaggtccaggtggatggaatgaccctgatatgcttgtcatagggaactttgggctatcatgggaccaacaagttacacaaatggctttgtgggcgatcatggccggccccctattcatgtctaatgatctacgtgcgataagcccccaagcaaaggctttacttcaagataaggatgtcatagcgatcaaccaagatcctcttggtaaacaaggttatcaattgagaaaaggtgacaactttgaagtgtgggaaagaccattgtctggagacgcgtgggctgttgctattatcaaccgtcaagagatcggagggccaagatcttacactatcccggtagcctctttgggtgatggtcaggcgtgcaatcctgcctgcttcattacacaattgcttccagttaagagaaaattgggtttctatgaagcaacctctaggctaagaagtcacattaatcctactggtacggtattgttgcaattggagaacacaatgcaaaccgtattgaaagatttgctgtaa

SEQ ID NO: 306 - protein, 398 aa, Artificial Sequence
  variant of human alpha-galactosidase A
LDNGLARTPPMGWLHWERFMCNLDCQEEPDSCISEKLFEEMAERMVVEGWKDAGYEYLCIDDCWMAPQRDSEGRLQADPQRFPHGIRQLANHVHSKGLKLGIYADVGNKTCAGFPGSFGYYDIDAQTFADWGVDLLKFDGCYCDSLENLADGYKHMSLALNKTGRPIVYSCEWPLYMWPFQKPNYTEIRQYCNHWRNFADIDDSWASIKSILDWTSRNQERIVDVAGPGGWNDPDMLVIGNFGLSWDQQVTQMALWAIMAGPLFMSNDLRAISPQAKALLQDKDVIAINQDPLGKQGYQLRKGDNFEVWERPLSGDAWAVAIINRQEIGGPRSYTIPVASLGDGQACNPACFITQLLPVKRKLGFYEATSRLRSHINPTGTVLLQLENTMQTVLKDLL

SEQ ID NO: 307 - DNA, 1197 bp, Artificial Sequence
  variant of human alpha-galactosidase A
ttggataacgggttagcccgtacacctccgatgggttggcttcactgggaaagattcatgtgtaacttagattgccaagaagagcctgacagctgtatctcagagaaactattcgaggagatggctgaacggatggtaactgaaggatggaaggatgctggttatgaatacctatgtattgatgattgctggatggctccacagcgtgattcagaaggtaggttacaagctgacccccagagattcccacatggcatacgtcagcttgcaaaccatgtacacagcaaaggtctaaagttaggcatctacgctgatgtcggaaacaagacatgtgctggtttcccaggttcattcggttactatgacatagatgcgcagacgtttgctgattggggtgttgatttgttgaagtttgatggatgctactgcgattccctggagaacctagccgatgggtacaaacacatgagtctggctctaaacaaaactggtaggccgatcgtctatagttgtgaatggcccttgtacatgtggccgtttcagaagccaaactacactgagataagacaatactgtaaccattggcgtaactttgctgacatagatgattcatggtcgtcaatcaaatctatcttggattggacttctaagaaccaggaaagaattgttgatgttgcaggtccaggtggatggaatgaccctgatatgcttgtcatagggaactttgggctatcatgggaccaacaagttacacaaatggctttgtgggcgatcatggccggccccctattcatgtctaatgatctacgtgcgataagcccccaagcaaaggctttacttcaagataaggatgtcatagcgatcaaccaagatcctcttggtaaacaaggttatcaattgcgtaaaggtgacaactttgaagtgtgggaaagaccattgtctggagacgcgtgggctgttgctattatcaaccgtcaagagatcggagggccaagatcttacactatcccggtagcctctttgggtaagggtgttgcgtgcaatcctgcctgcttcattacacaattgcttccagttaagagaaaattgggtttctatgaagcaacctctaggctaagaagtcacattaatcctactggtacggtattgttgcaattggagaacacaatgcaaacctctttgaaagatttgttataa

SEQ ID NO: 308 - protein, 398 aa, Artificial Sequence
  variant of human alpha-galactosidase A
LDNGLARTPPMGWLHWERFMCNLDCQEEPDSCISEKLFEEMAERMVTEGWKDAGYEYLCIDDCWMAPQRDSEGRLQADPQRFPHGIRQLANHVHSKGLKLGIYADVGNKTCAGFPGSFGYYDIDAQTFADWGVDLLKFDGCYCDSLENLADGYKHMSLALNKTGRPIVYSCEWPLYMWPFQKPNYTEIRQYCNHWRNFADIDDSWSSIKSILDWTSKNQERIVDVAGPGGWNDPDMLVIGNFGLSWDQQVTQMALWAIMAGPLFMSNDLRAISPQAKALLQDKDVIAINQDPLGKQGYQLRKGDNFEVWERPLSGDAWAVAIINRQEIGGPRSYTIPVASLGKGVACNPACFITQLLPVKRKLGFYEATSRLRSHINPTGTVLLQLENTMQTSLKDLL

SEQ ID NO: 309 - DNA, 1197 bp, Artificial Sequence
  variant of human alpha-galactosidase A
ttggataacgggttagcccgtacacctccgatgggttggcttcactgggaaagattcatgtgtaacttagattgccaagaagagcctgacagctgtatctcagagaaactattcgaagagatggctgaacggatggtaactgaaggatggaaggatgctggttatgaatacctatgtattgatgattgctggatggctccacagcgtgattcagaaggtaggttacaagctgacccccagagattcccacatggcatacgtcagcttgcaaaccatgtacacagcaaaggtctaaagttaggcatctacgctgatgtcggaaacaagacatgtgctggtttcccaggttcattcggttactatgacatagatgcgcagacgtttgctgattggggtgttgatttgttgaagtttgatggatgctactgcgattccctggagaacctagccgatgggtacaaacacatgagtctggctctaaacaaaactggtaggccgatcgtctatagttgtgaatggcccttgtacatgtggccgtttcagaagccaaactacactgagataagacaatactgtaaccattggcgtaactttgctgacatagatgattcatgggcttcaatcaaatctatcttggattggacttctcgtaaccaggaaagaattgttgatgttgcaggtccaggtggatggaatgaccctgatatgcttgtcatagggaactttgggctatcatgggaccaacaagttacacaaatggctttgtgggcgatcatggccggccccctattcatgtctaatgatctacgtgcgataagcccccaagcaaaggctttacttcaagataaggatgtcatagcgatcaaccaagatcctcttggtaaacaaggttatcaattgagaaaaggtgacaactttgaagtgtgggaaagaccattgtctggagacgcgtgggctgttgctattatcaaccgtcaagagatcggagggccaagatcttacactatccgtgtagcctctttgggtggtggtcaggcgtgcaatcctgcctgcttcattacacaattgcttccagttaagagaaaattgggtttctatgaagcaacctctaggctaagaagtcacattaatcctactggtacggtattgttgcaattggagaacacaatgcaaaccagcttgaaagatttggcgtaa

SEQ ID NO: 310 - protein, 398 aa, Artificial Sequence
  variant of human alpha-galactosidase A
LDNGLARTPPMGWLHWERFMCNLDCQEEPDSCISEKLFEEMAERMVTEGWKDAGYEYLCIDDCWMAPQRDSEGRLQADPQRFPHGIRQLANHVHSKGLKLGIYADVGNKTCAGFPGSFGYYDIDAQTFADWGVDLLKFDGCYCDSLENLADGYKHMSLALNKTGRPIVYSCEWPLYMWPFQKPNYTEIRQYCNHWRNFADIDDSWASIKSILDWTSRNQERIVDVAGPGGWNDPDMLVIGNFGLSWDQQVTQMALWAIMAGPLFMSNDLRAISPQAKALLQDKDVIAINQDPLGKQGYQLRKGDNFEVWERPLSGDAWAVAIINRQEIGGPRSYTIRVASLGGGQACNPACFITQLLPVKRKLGFYEATSRLRSHINPTGTVLLQLENTMQTSLKDLA

SEQ ID NO: 311 - DNA, 1197 bp, Artificial Sequence
  variant of human alpha-galactosidase A
ttggataacgggttagcccgtacacctccgatgggttggcttcactgggaaagattcatgtgtaacttagattgccaagaagagcctgacagctgtatctcagagaaactattcgaagagatggctgaacggatggtaactgaaggatggaaggatgctggttatgaatacctatgtattgatgattgctggatggctccacagcgtgattcagaaggtaggttacaagctgacccccagagattcccacatggcatacgtcagcttgcaaaccatgtacacagcaaaggtctaaagttaggcatctacgctgatgtcggaaacaagacatgtgctggtttcccaggttcattcggttactatgacatagatgcgcagacgtttgctgattggggtgttgatttgttgaagtttgatggatgctactgcgattccctggagaacctagccgatgggtacaaacacatgagtctggctctaaacaaaactggtaggccgatcgtctatagttgtgaatggcccttgtacatgtggccgtttcagaagccaaactacactgagataagacaatactgtaaccattggcgtaactttgctgacatagatgattcatgggcttcaatcaaatctatcttggattggacttctcgtaaccaggaaagaattgttgatgttgcaggtccaggtggatggaatgaccctgatatgcttgtcatagggaactttgggctatcatgggaccaacaagttacacaaatggctttgtgggcgatcatggccggccccctattcatgtctaatgatctacgtgcgataagcccccaagcaaaggctttacttcaaaacaaggatgtcatagcgatcaaccaagatcctcttggtaaacaaggttatcaattgagaaaaggtgacaactttgaagtgtgggaaagaccattgtctggagacgcgtgggctgttgctattatcaaccgtcaagagatcggagggccaagatcttacactatcccggtagcctctttgggtaagggtgttgcgtgcaatcctgcctgcttcattacacaattgcttccagttaagagaaaattgggtttctatgaagcaacctctaggctaagaagtcacattaatcctactggtacggtattgttgcaattggagaacacaatgcaaaccgtattgaaagatttgctgtaa

SEQ ID NO: 312 - protein, 398 aa, Artificial Sequence
  variant of human alpha-galactosidase A
LDNGLARTPPMGWLHWERFMCNLDCQEEPDSCISEKLFEEMAERMVTEGWKDAGYEYLCIDDCWMAPQRDSEGRLQADPQRFPHGIRQLANHVHSKGLKLGIYADVGNKTCAGFPGSFGYYDIDAQTFADWGVDLLKFDGCYCDSLENLADGYKHMSLALNKTGRPIVYSCEWPLYMWPFQKPNYTEIRQYCNHWRNFADIDDSWASIKSILDWTSRNQERIVDVAGPGGWNDPDMLVIGNFGLSWDQQVTQMALWAIMAGPLFMSNDLRAISPQAKALLQNKDVIAINQDPLGKQGYQLRKGDNFEVWERPLSGDAWAVAIINRQEIGGPRSYTIPVASLGKGVACNPACFITQLLPVKRKLGFYEATSRLRSHINPTGTVLLQLENTMQTVLKDLL

SEQ ID NO: 313 - DNA, 1197 bp, Artificial Sequence
  variant of human alpha-galactosidase A
ttggataacgggttagcccgtacacctccgatgggttggcttcactgggaaagattcatgtgtaacttagattgccaagaagagcctgacagctgtatctcagagaaactattcgaagagatggctgaacggatggtaactgaaggatggaaggatgctggttatgaatacctatgtattgatgattgctggatggctccacagcgtgattcagaaggtaggttacaagctgacccccagagattcccacatggcatacgtcagcttgcaaaccatgtacacagcaaaggtctaaagttaggcatctacgctgatgtcggaaacaagacatgtgctggtttcccaggttcattcggttactatgacatagatgcgcagacgtttgctgattggggtgttgatttgttgaagtttgatggatgctactgcgattccctggagaacctagccgatgggtacaaacacatgagtctggctctaaacaaaactggtaggccgatcgtctatagttgtgaatggcccttgtacatgtggccgtttcagaagccaaactacactgagataagacaatactgtaaccattggcgtaactttgctgacatagatgattcatgggcgtcaatcaaatctatcttggattggacttctcgcaaccaggaaagaattgttgatgttgcaggtccaggtggatggaatgaccctgatatgcttgtcatagggaactttgggctatcatgggaccaacaagttacacaaatggctttgtgggcgatcatggccggccccctattcatgtctaatgatctacgtgcgataagcccccaagcaaaggctttacttcaagataaggatgtcatagcgatcaaccaagatcctcttggtaaacaaggttatcaattgagaaaaggtgacaactttgaagtgtgggaaagaccattgtctggagacgcgtgggctgttgctattatcaaccgtcaagagatcggagggccaagatcttacactatcccggtagcctctttgggtgatggtgtcgcgtgcaatcctgcctgcttcattacacaattgcttccagttaagagaaaattgggtttctatgaagcaacctctaggctaagaagtcacattaatcctactggtacggtattgttgcaattggagaacacaatgcaaacctctttgaaagatttgttataa

SEQ ID NO: 314 - protein, 398 aa, Artificial Sequence
  variant of human alpha-galactosidase A
LDNGLARTPPMGWLHWERFMCNLDCQEEPDSCISEKLFEEMAERMVTEGWKDAGYEYLCIDDCWMAPQRDSEGRLQADPQRFPHGIRQLANHVHSKGLKLGIYADVGNKTCAGFPGSFGYYDIDAQTFADWGVDLLKFDGCYCDSLENLADGYKHMSLALNKTGRPIVYSCEWPLYMWPFQKPNYTEIRQYCNHWRNFADIDDSWASIKSILDWTSRNQERIVDVAGPGGWNDPDMLVIGNFGLSWDQQVTQMALWAIMAGPLFMSNDLRAISPQAKALLQDKDVIAINQDPLGKQGYQLRKGDNFEVWERPLSGDAWAVAIINRQEIGGPRSYTIPVASLGDGVACNPACFITQLLPVKRKLGFYEATSRLRSHINPTGTVLLQLENTMQTSLKDLL

SEQ ID NO: 315 - DNA, 1197 bp, Artificial Sequence
  variant of human alpha-galactosidase A
ttggataacgggttagcccgtacacctccgatgggttggcttcactgggaaagattcatgtgtaacttagattgccaagaagagcctgacagctgtatctcagagaaactattcgaagagatggctgaacggatggtaactgaaggatggaaggatgctggttatgaatacctatgtattgatgattgctggatggctccacagcgtgattcagaaggtaggttacaagctgacccccagagattcccacatggcatacgtcagcttgcaaaccatgtacacagcaaaggtctaaagttaggcatctacgctgatgtcggaaacaagacatgtgctggtttcccaggttcattcggttactatgacatagatgcgcagacgtttgctgattggggtgttgatttgttgaagtttgatggatgctactgcgattccctggagaacctagccgatgggtacaaacacatgagtctggctctaaacaaaactggtaggccgatcgtctatagttgtgaatggcccttgtacatgtggccgtttcagaagccaaactacactgagataagacaatactgtaaccattggcgtaactttgctgacatagatgattcatgggcttcaatcaaatctatcttggattggacttctcgcaaccaggaaagaattgttgatgttgcaggtccaggtggatggaatgaccctgatatgcttgtcatagggaactttgggctatcatgggaccaacaagttacacaaatggctttgtgggcgatcatggccggccccctattcatgtctaatgatctacgtgcgataagcccccaagcaaaggctttacttcaagataaggatgtcatagcgatcaaccaagatcctcttggtaaacaaggttatcaattgagaaaaggtgacaactttgaagtgtgggaaagaccattgtctggagacgcgtgggctgttgctattatcaaccgtcaagagatcggagggccaagatcttacactatcccggtagcctctttgggtgatggtcaggcgtgcaatcctgcctgcttcattacacaattgcttccagttaagagaaaattgggtttctatgaagcaacctctaggctaagaagtcacattaatcctactggtacggtattgttgcaattggagaacacaatgcaaaccgtattgaaagatttggcgtaa

SEQ ID NO: 316 - protein, 398 aa, Artificial Sequence
  variant of human alpha-galactosidase A
LDNGLARTPPMGWLHWERFMCNLDCQEEPDSCISEKLFEEMAERMVTEGWKDAGYEYLCIDDCWMAPQRDSEGRLQADPQRFPHGIRQLANHVHSKGLKLGIYADVGNKTCAGFPGSFGYYDIDAQTFADWGVDLLKFDGCYCDSLENLADGYKHMSLALNKTGRPIVYSCEWPLYMWPFQKPNYTEIRQYCNHWRNFADIDDSWASIKSILDWTSRNQERIVDVAGPGGWNDPDMLVIGNFGLSWDQQVTQMALWAIMAGPLFMSNDLRAISPQAKALLQDKDVIAINQDPLGKQGYQLRKGDNFEVWERPLSGDAWAVAIINRQEIGGPRSYTIPVASLGDGQACNPACFITQLLPVKRKLGFYEATSRLRSHINPTGTVLLQLENTMQTVLKDLA

SEQ ID NO: 317 - DNA, 1197 bp, Artificial Sequence
  variant of human alpha-galactosidase A
ttggataacgggttagcccgtacacctccgatgggttggcttcactgggaaagattcatgtgtaacttagattgccaagaagagcctgacagctgtatctcagagaaactattcgtggagatggctgaacggatggtagttgaaggatggaaggatgctggttatgaatacctatgtattgatgattgctggatggctccacagcgtgattcagaaggtaggttacaagctgacccccagagattcccacatggcatacgtcagcttgcaaaccatgtacacagcaaaggtctaaagttaggcatctacgctgatgtcggaaacaagacatgtgctggtttcccaggttcattcggttactatgacatagatgcgcagacgtttgctgattggggtgttgatttgttgaagtttgatggatgctactgcgattccctggagaacctagccgatgggtacaaacacatgagtctggctctaaacaaaactggtaggccgatcgtctatagttgtgaatggcccttgtacatgtggccgtttcagaagccaaactacactgagataagacaatactgtaaccattggcgtaactttgctgacatagatgattcatgggcttcaatcaaatctatcttggattggacttctaagaaccaggaaagaattgttgatgttgcaggtccaggtggatggaatgaccctgatatgcttgtcatagggaactttgggctatcatgggaccaacaagttacacaaatggctttgtgggcgatcatggccggccccctattcatgtctaatgatctacgtgcgataagcccccaagcaaaggctttacttcaagataaggatgtcatagcgatcaaccaagatcctcttggtaaacaaggttatcaattgagaaaaggtgacaactttgaagtgtgggaaagaccattgtctggagacgcgtgggctgttgctattatcaaccgtcaagagatcggagggccaagatcttacactatcccggtagcctctttgggtaagggtgttgcgtgcaatcctgcctgcttcattacacaattgcttccagttaagagaaaattgggtttctatgaagcaacctctaggctaagaagtcacattaatcctactggtacggtattgttgcaattggagaacacaatgcaaaccagcttgaaagatttgctgtaa

SEQ ID NO: 318 - protein, 398 aa, Artificial Sequence
  variant of human alpha-galactosidase A
LDNGLARTPPMGWLHWERFMCNLDCQEEPDSCISEKLFVEMAERMVVEGWKDAGYEYLCIDDCWMAPQRDSEGRLQADPQRFPHGIRQLANHVHSKGLKLGIYADVGNKTCAGFPGSFGYYDIDAQTFADWGVDLLKFDGCYCDSLENLADGYKHMSLALNKTGRPIVYSCEWPLYMWPFQKPNYTEIRQYCNHWRNFADIDDSWASIKSILDWTSKNQERIVDVAGPGGWNDPDMLVIGNFGLSWDQQVTQMALWAIMAGPLFMSNDLRAISPQAKALLQDKDVIAINQDPLGKQGYQLRKGDNFEVWERPLSGDAWAVAIINRQEIGGPRSYTIPVASLGKGVACNPACFITQLLPVKRKLGFYEATSRLRSHINPTGTVLLQLENTMQTSLKDLL

SEQ ID NO: 319 - DNA, 1197 bp, Artificial Sequence
  variant of human alpha-galactosidase A
ttggataacgggttagcccgtacacctccgatgggttggcttcactgggaaagattcatgtgtaacttagattgccaagaagagcctgacagctgtatctcagagaaactattcgaagagatggctgaacggatggtaactgaaggatggaaggatgctggttatgaatacctatgtattgatgattgctggatggctccacagcgtgattcagaaggtaggttacaagctgacccccagagattcccacatggcatacgtcagcttgcaaaccatgtacacagcaaaggtctaaagttaggcatctacgctgatgtcggaaacaagacatgtgctggtttcccaggttcattcggttactatgacatagatgcgcagacgtttgctgattggggtgttgatttgttgaagtttgatggatgctactgcgattccctggagaacctagccgatgggtacaaacacatgagtctggctctaaacaaaactggtaggccgatcgtctatagttgtgaatggcccttgtacatgtggccgtttcagaagccaaactacactgagataagacaatactgtaaccattggcgtaactttgctgacatagatgattcatggtcgtcaatcaaatctatcttggattggacttctcgtaaccaggaaagaattgttgatgttgcaggtccaggtggatggaatgaccctgatatgcttgtcatagggaactttgggctatcatgggaccaacaagttacacaaatggctttgtgggcgatcatggccggccccctattcatgtctaatgatctacgtgcgataagcccccaagcaaaggctttacttcaagataaggatgtcatagcgatcaaccaagatcctcttggtaaacaaggttatcaattgagaaaaggtgacaactttgaagtgtgggaaagaccattgtctggagacgcgtgggctgttgctattatcaaccgtcaagagatcggagggccaagatcttacactatcccggtagcctctttgggtaagggtgtcgcgtgcaatcctgcctgcttcattacacaattgcttccagttaagagaaaattgggtttctatgaagcaacctctaggctaagaagtcacattaatcctactggtacggtattgttgcaattggagaacacaatgcaaacctctttgaaagatttgttataa

SEQ ID NO: 320 - protein, 398 aa, Artificial Sequence
  variant of human alpha-galactosidase A
LDNGLARTPPMGWLHWERFMCNLDCQEEPDSCISEKLFEEMAERMVTEGWKDAGYEYLCIDDCWMAPQRDSEGRLQADPQRFPHGIRQLANHVHSKGLKLGIYADVGNKTCAGFPGSFGYYDIDAQTFADWGVDLLKFDGCYCDSLENLADGYKHMSLALNKTGRPIVYSCEWPLYMWPFQKPNYTEIRQYCNHWRNFADIDDSWSSIKSILDWTSRNQERIVDVAGPGGWNDPDMLVIGNFGLSWDQQVTQMALWAIMAGPLFMSNDLRAISPQAKALLQDKDVIAINQDPLGKQGYQLRKGDNFEVWERPLSGDAWAVAIINRQEIGGPRSYTIPVASLGKGVACNPACFITQLLPVKRKLGFYEATSRLRSHINPTGTVLLQLENTMQTSLKDLL

SEQ ID NO: 321 - DNA, 1197 bp, Artificial Sequence
  variant of human alpha-galactosidase A
ttggataacgggttagcccgtacacctccgatgggttggcttcactgggaaagattcatgtgtaacttagattgccaagaagagcctgacagctgtatctcagagaaactattcgaagagatggctgaacggatggtaactgaaggatggaaggatgctggttatgaatacctatgtattgatgattgctggatggctccacagcgtgattcagaaggtaggttacaagctgacccccagagattcccacatggcatacgtcagcttgcaaaccatgtacacagcaaaggtctaaagttaggcatctacgctgatgtcggaaacaagacatgtgctggtttcccaggttcattcggttactatgacatagatgcgcagacgtttgctgattggggtgttgatttgttgaagtttgatggatgctactgcgattccctggagaacctagccgatgggtacaaacacatgagtctggctctaaacaaaactggtaggccgatcgtctatagttgtgaatggcccttgtacatgtggccgtttcagaagccaaactacactgagataagacaatactgtaaccattggcgtaactttgctgacatagatgattcatgggcttcaatcaaatctatcttggattggacttctcgtaaccaggaaagaattgttgatgttgcaggtccaggtggatggaatgaccctgatatgcttgtcatagggaactttgggctatcatgggaccaacaagttacacaaatggctttgtgggcgatcatggccggccccctattcatgtctaatgatctacgtgcgataagcccccaagcaaaggctttacttcaagataaggatgtcatagcgatcaaccaagatcctcttggtaaacaaggttatcaattgagaaaaggtgacaactttgaagtgtgggaaagaccattgtctggagacgcgtgggctgttgctattatcaaccgtcaagagatcggagggccaagatcttacactatccctgtagcctctttgggtaagggtgttgcgtgcaatcctgcctgcttcattacacaattgcttccagttaagagaaaattgggtttctatgaagcaacctctaggctaagaagtcacattaatcctactggtacggtattgttgcaattggagaacacaatgcaaaccgtattgaaagatttggcgtaa

SEQ ID NO: 322 - protein, 398 aa, Artificial Sequence
  variant of human alpha-galactosidase A
LDNGLARTPPMGWLHWERFMCNLDCQEEPDSCISEKLFEEMAERMVTEGWKDAGYEYLCIDDCWMAPQRDSEGRLQADPQRFPHGIRQLANHVHSKGLKLGIYADVGNKTCAGFPGSFGYYDIDAQTFADWGVDLLKFDGCYCDSLENLADGYKHMSLALNKTGRPIVYSCEWPLYMWPFQKPNYTEIRQYCNHWRNFADIDDSWASIKSILDWTSRNQERIVDVAGPGGWNDPDMLVIGNFGLSWDQQVTQMALWAIMAGPLFMSNDLRAISPQAKALLQDKDVIAINQDPLGKQGYQLRKGDNFEVWERPLSGDAWAVAIINRQEIGGPRSYTIPVASLGKGVACNPACFITQLLPVKRKLGFYEATSRLRSHINPTGTVLLQLENTMQTVLKDLA

SEQ ID NO: 323 - DNA, 1197 bp, Artificial Sequence
  variant of human alpha-galactosidase A
ttggataacgggttagcccgtacacctccgatgggttggcttcactgggaaagattcatgtgtaacttagattgccaagaagagcctgacagctgtatctcagagaaactattcgtggagatggctgaacggatggtaactgaaggatggaaggatgctggttatgaatacctatgtattgatgattgctggatggctccacagcgtgattcagaaggtaggttacaagctgacccccagagattcccacatggcatacgtcagcttgcaaaccatgtacacagcaaaggtctaaagttaggcatctacgctgatgtcggaaacaagacatgtgctggtttcccaggttcattcggttactatgacatagatgcgcagacgtttgctgattggggtgttgatttgttgaagtttgatggatgctactgcgattccctggagaacctagccgatgggtacaaacacatgagtctggctctaaacaaaactggtaggccgatcgtctatagttgtgaatggcccttgtacatgtggccgtttcagaagccaaactacactgagataagacaatactgtaaccattggcgtaactttgctgacatagatgattcatgggcttcaatcaaatctatcttggattggacttctcgtaaccaggaaagaattgttgatgttgcaggtccaggtggatggaatgaccctgatatgcttgtcatagggaactttgggctatcatgggaccaacaagttacacaaatggctttgtgggcgatcatggccggccccctattcatgtctaatgatctacgtgcgataagcccccaagcaaaggctttacttcaaaacaaggatgtcatagcgatcaaccaagatcctcttggtaaacaaggttatcaattgagaaaaggtgacaactttgaagtgtgggaaagaccattgtctggagacgcgtgggctgttgctattatcaaccgtcaagagatcggagggccaagatcttacactatccgtgtagcctctttgggtaagggtgttgcgtgcaatcctgcctgcttcattacacaattgcttccagttaagagaaaattgggtttctatgaagcaacctctaggctaagaagtcacattaatcctactggtacggtattgttgcaattggagaacacaatgcaaacctctttgaaagatttggcgtaa

SEQ ID NO: 324 - protein, 398 aa, Artificial Sequence
  variant of human alpha-galactosidase A
LDNGLARTPPMGWLHWERFMCNLDCQEEPDSCISEKLFVEMAERMVTEGWKDAGYEYLCIDDCWMAPQRDSEGRLQADPQRFPHGIRQLANHVHSKGLKLGIYADVGNKTCAGFPGSFGYYDIDAQTFADWGVDLLKFDGCYCDSLENLADGYKHMSLALNKTGRPIVYSCEWPLYMWPFQKPNYTEIRQYCNHWRNFADIDDSWASIKSILDWTSRNQERIVDVAGPGGWNDPDMLVIGNFGLSWDQQVTQMALWAIMAGPLFMSNDLRAISPQAKALLQNKDVIAINQDPLGKQGYQLRKGDNFEVWERPLSGDAWAVAIINRQEIGGPRSYTIRVASLGKGVACNPACFITQLLPVKRKLGFYEATSRLRSHINPTGTVLLQLENTMQTSLKDLA

SEQ ID NO: 325 - DNA, 1197 bp, Artificial Sequence
  variant of human alpha-galactosidase A
ttggataacgggttagcccgtacacctccgatgggttggcttcactgggaaagattcatgtgtaacttagattgccaagaagagcctgacagctgtatctcagagaaactattcgaagagatggctgaacggatggtaactgaaggatggaaggatgctggttatgaatacctatgtattgatgattgctggatggctccacagcgtgattcagaaggtaggttacaagctgacccccagagattcccacatggcatacgtcagcttgcaaaccatgtacacagcaaaggtctaaagttaggcatctacgctgatgtcggaaacaagacatgtgctggtttcccaggttcattcggttactatgacatagatgcgcagacgtttgctgattggggtgttgatttgttgaagtttgatggatgctactgcgattccctggagaacctagccctggggtacaaacacatgagtctggctctaaacaaaactggtaggccgatcgtctatagttgtgaatggcccttgtacatgtggccgtttcagaagccaaactacactgagataagacaatactgtaaccattggcgtaactttgctgacatagatgattcatgggcttcaatcaaatctatcttggattggacttctcgtaaccaggaaagaattgttgatgttgcaggtccaggtggatggaatgaccctgatatgcttgtcatagggaactttgggctatcatgggaccaacaagttacacaaatggctttgtgggcgatcatggccggccccctattcatgtctaatgatctacgtgcgataagcccccaagcaaaggctttacttcaagacaaggatgtcatagcgatcaaccaagatcctcttggtaaacaaggttatcaattgagaaaaggtgacaactttgaagtgtgggaaagaccattgtctggagacgcgtgggctgttgctattatcaaccgtcaagagatcggagggccaagatcttacactatcccggtagcctctttgggtaagggtgttgcgtgcaatcctgcctgcttcattacacaattgcttccagttaagagaaaattgggtttctatgaagcaacctctaggctaagaagtcacattaatcctactggtacggtattgttgcaattggagaacacaatgcaaacctctttgaaagatttgttataa

SEQ ID NO: 326 - protein, 398 aa, Artificial Sequence
  variant of human alpha-galactosidase A
LDNGLARTPPMGWLHWERFMCNLDCQEEPDSCISEKLFEEMAERMVTEGWKDAGYEYLCIDDCWMAPQRDSEGRLQADPQRFPHGIRQLANHVHSKGLKLGIYADVGNKTCAGFPGSFGYYDIDAQTFADWGVDLLKFDGCYCDSLENLALGYKHMSLALNKTGRPIVYSCEWPLYMWPFQKPNYTEIRQYCNHWRNFADIDDSWASIKSILDWTSRNQERIVDVAGPGGWNDPDMLVIGNFGLSWDQQVTQMALWAIMAGPLFMSNDLRAISPQAKALLQDKDVIAINQDPLGKQGYQLRKGDNFEVWERPLSGDAWAVAIINRQEIGGPRSYTIPVASLGKGVACNPACFITQLLPVKRKLGFYEATSRLRSHINPTGTVLLQLENTMQTSLKDLL

SEQ ID NO: 327 - DNA, 1197 bp, Artificial Sequence
  variant of human alpha-galactosidase A
ttggataacgggttagcccgtacacctccgatgggttggcttcactgggaaagattcatgtgtaacttagattgccaagaagagcctgacagctgtatctcagagaaactattcgaagagatggctgaacggatggtaactgaaggatggaaggatgctggttatgaatacctatgtattgatgattgctggatggctccacagcgtgattcagaaggtaggttacaagctgacccccagagattcccacatggcatacgtcagcttgcaaaccatgtacacagcaaaggtctaaagttaggcatctacgctgatgtcggaaacaagacatgtgctggtttcccaggttcattcggttactatgacatagatgcgcagacgtttgctgattggggtgttgatttgttgaagtttgatggatgctactgcgattccctggagaacctagccgatgggtacaaacacatgagtctggctctaaacaaaactggtaggccgatcgtctatagttgtgaatggcccttgtacatgtggccgtttcagaagccaaactacactgagataagacaatactgtaaccattggcgtaactttgctgacatagatgattcatgggcttcaatcaaatctatcttggattggacttctcgcaaccaggaaagaattgttgatgttgcaggtccaggtggatggaatgaccctgatatgcttgtcatagggaactttgggctatcatgggaccaacaagttacacaaatggctttgtgggcgatcatggccggccccctattcatgtctaatgatctacgtgcgataagcccccaagcaaaggctttacttcaagataaggatgtcatagcgatcaaccaagatcctcttggtaaacaaggttatcaattgagaaaaggtgacaactttgaagtgtgggaaagaccattgtctggagacgcgtgggctgttgctattatcaaccgtcaagagatcggagggccaagatcttacactatcccggtagcctctttgggtaagggtgttgcgtgcaatcctgcctgcttcattacacaattgcttccagttaagagaaaattgggtttctatgaagcaacctctaggctaagaagtcacattaatcctactggtacggtattgttgcaattggagaacacaatgcaaaccgtattgaaagatttgctgtaa

SEQ ID NO: 328 - protein, 398 aa, Artificial Sequence
  variant of human alpha-galactosidase A
LDNGLARTPPMGWLHWERFMCNLDCQEEPDSCISEKLFEEMAERMVTEGWKDAGYEYLCIDDCWMAPQRDSEGRLQADPQRFPHGIRQLANHVHSKGLKLGIYADVGNKTCAGFPGSFGYYDIDAQTFADWGVDLLKFDGCYCDSLENLADGYKHMSLALNKTGRPIVYSCEWPLYMWPFQKPNYTEIRQYCNHWRNFADIDDSWASIKSILDWTSRNQERIVDVAGPGGWNDPDMLVIGNFGLSWDQQVTQMALWAIMAGPLFMSNDLRAISPQAKALLQDKDVIAINQDPLGKQGYQLRKGDNFEVWERPLSGDAWAVAIINRQEIGGPRSYTIPVASLGKGVACNPACFITQLLPVKRKLGFYEATSRLRSHINPTGTVLLQLENTMQTVLKDLL

SEQ ID NO: 329 - DNA, 1197 bp, Artificial Sequence
  variant of human alpha-galactosidase A
ttggataacgggttagcccgtacacctccgatgggttggcttcactgggaaagattcatgtgtaacttagattgccaagaagagcctgacagctgtatctcagagaaactattcgaggagatggctgaacggatggtaactgaaggatggaaggatgctggttatgaatacctatgtattgatgattgctggatggctccacagcgtgattcagaaggtaggttacaagctgacccccagagattcccacatggcatacgtcagcttgcaaaccatgtacacagcaaaggtctaaagttaggcatctacgctgatgtcggaaacaagacatgtgctggtttcccaggttcattcggttactatgacatagatgcgcagacgtttgctgattggggtgttgatttgttgaagtttgatggatgctactgcgattccctggagaacctagccgatgggtacaaacacatgagtctggctctaaacaaaactggtaggccgatcgtctatagttgtgaatggcccttgtacatgtggccgtttcagaagccaaactacactgagataagacaatactgtaaccattggcgtaactttgctgacatagatgattcatgggcttcaatcaaatctatcttggattggacttctaagaaccaggaaagaattgttgatgttgcaggtccaggtggatggaatgaccctgatatgcttgtcatagggaactttgggctatcatgggaccaacaagttacacaaatggctttgtgggcgatcatggccggccccctattcatgtctaatgatctacgtgcgataagcccccaagcaaaggctttacttcaagataaggatgtcatagcgatcaaccaagatcctcttggtaaacaaggttatcaattgagaaaaggtgacaactttgaagtgtgggaaagaccattgtctggagacgcgtgggctgttgctattatcaaccgtcaagagatcggagggccaagatcttacactatccgtgtagcctctttgggtaagggtcaggcgtgcaatcctgcctgcttcattacacaattgcttccagttaagagaaaattgggtttctatgaagcaacctctaggctaagaagtcacattaatcctactggtacggtattgttgcaattggagaacacaatgcaaaccagcttgaaagatttggcgtaa

SEQ ID NO: 330 - protein, 398 aa, Artificial Sequence
  variant of human alpha-galactosidase A
LDNGLARTPPMGWLHWERFMCNLDCQEEPDSCISEKLFEEMAERMVTEGWKDAGYEYLCIDDCWMAPQRDSEGRLQADPQRFPHGIRQLANHVHSKGLKLGIYADVGNKTCAGFPGSFGYYDIDAQTFADWGVDLLKFDGCYCDSLENLADGYKHMSLALNKTGRPIVYSCEWPLYMWPFQKPNYTEIRQYCNHWRNFADIDDSWASIKSILDWTSKNQERIVDVAGPGGWNDPDMLVIGNFGLSWDQQVTQMALWAIMAGPLFMSNDLRAISPQAKALLQDKDVIAINQDPLGKQGYQLRKGDNFEVWERPLSGDAWAVAIINRQEIGGPRSYTIRVASLGKGQACNPACFITQLLPVKRKLGFYEATSRLRSHINPTGTVLLQLENTMQTSLKDLA

SEQ ID NO: 331 - DNA, 1197 bp, Artificial Sequence
  variant of human alpha-galactosidase A
ttggataacgggttagcccgtacacctccgatgggttggcttcactgggaaagattcatgtgtaacttagattgccaagaagagcctgacagctgtatctcagagaaactattcgaagagatggctgaacggatggtaactgaaggatggaaggatgctggttatgaatacctatgtattgatgattgctggatggctccacagcgtgattcagaaggtaggttacaagctgacccccagagattcccacatggcatacgtcagcttgcaaaccatgtacacagcaaaggtctaaagttaggcatctacgctgatgtcggaaacaagacatgtgctggtttcccaggttcattcggttactatgacatagatgcgcagacgtttgctgattggggtgttgatttgttgaagtttgatggatgctactgcgattccctggagaacctagccctggggtacaaacacatgagtctggctctaaacaaaactggtaggccgatcgtctatagttgtgaatggcccttgtacatgtggccgtttcagaagccaaactacactgagataagacaatactgtaaccattggcgtaactttgctgacatagatgattcatgggcttcaatcaaatctatcttggattggacttctcgtaaccaggaaagaattgttgatgttgcaggtccaggtggatggaatgaccctgatatgcttgtcatagggaactttgggctatcatgggaccaacaagttacacaaatggctttgtgggcgatcatggccggccccctattcatgtctaatgatctacgtgcgataagcccccaagcaaaggctttacttcaaaacaaggatgtcatagcgatcaaccaagatcctcttggtaaacaaggttatcaattgagaaaaggtgacaactttgaagtgtgggaaagaccattgtctggagacgcgtgggctgttgctattatcaaccgtcaagagatcggagggccaagatcttacactatcccggtagcctctttgggtaagggtgttgcgtgcaatcctgcctgcttcattacacaattgcttccagttaagagaaaattgggtttctatgaagcaacctctaggctaagaagtcacattaatcctactggtacggtattgttgcaattggagaacacaatgcaaaccgtattgaaagatttgctgtaa

SEQ ID NO: 332 - protein, 398 aa, Artificial Sequence
  variant of human alpha-galactosidase A
LDNGLARTPPMGWLHWERFMCNLDCQEEPDSCISEKLFEEMAERMVTEGWKDAGYEYLCIDDCWMAPQRDSEGRLQADPQRFPHGIRQLANHVHSKGLKLGIYADVGNKTCAGFPGSFGYYDIDAQTFADWGVDLLKFDGCYCDSLENLALGYKHMSLALNKTGRPIVYSCEWPLYMWPFQKPNYTEIRQYCNHWRNFADIDDSWASIKSILDWTSRNQERIVDVAGPGGWNDPDMLVIGNFGLSWDQQVTQMALWAIMAGPLFMSNDLRAISPQAKALLQNKDVIAINQDPLGKQGYQLRKGDNFEVWERPLSGDAWAVAIINRQEIGGPRSYTIPVASLGKGVACNPACFITQLLPVKRKLGFYEATSRLRSHINPTGTVLLQLENTMQTVLKDLL

SEQ ID NO: 333 - DNA, 1197 bp, Artificial Sequence
  variant of human alpha-galactosidase A
ttggataacgggttagcccgtacacctccgatgggttggcttcactgggaaagattcatgtgtaacttagattgccaagaagagcctgacagctgtatctcagagaaactattcgtggagatggctgaacggatggtaactgaaggatggaaggatgctggttatgaatacctatgtattgatgattgctggatggctccacagcgtgattcagaaggtaggttacaagctgacccccagagattcccacatggcatacgtcagcttgcaaaccatgtacacagcaaaggtctaaagttaggcatctacgctgatgtcggaaacaagacatgtgctggtttcccaggttcattcggttactatgacatagatgcgcagacgtttgctgattggggtgttgatttgttgaagtttgatggatgctactgcgattccctggagaacctagccgatgggtacaaacacatgagtctggctctaaacaaaactggtaggccgatcgtctatagttgtgaatggcccttgtacatgtggccgtttcagaagccaaactacactgagataagacaatactgtaaccattggcgtaactttgctgacatagatgattcatgggcttcaatcaaatctatcttggattggacttctcgtaaccaggaaagaattgttgatgttgcaggtccaggtggatggaatgaccctgatatgcttgtcatagggaactttgggctatcatgggaccaacaagttacacaaatggctttgtgggcgatcatggccggccccctattcatgtctaatgatctacgtgcgataagcccccaagcaaaggctttacttcaagacaaggatgtcatagcgatcaaccaagatcctcttggtaaacaaggttatcaattgagaaaaggtgacaactttgaagtgtgggaaagaccattgtctggagacgcgtgggctgttgctattatcaaccgtcaagagatcggagggccaagatcttacactatcccggtagcctctttgggtaagggtgttgcgtgcaatcctgcctgcttcattacacaattgcttccagttaagagaaaattgggtttctatgaagcaacctctaggctaagaagtcacattaatcctactggtacggtattgttgcaattggagaacacaatgcaaaccgtattgaaagatttggcgtaa

SEQ ID NO: 334 - protein, 398 aa, Artificial Sequence
  variant of human alpha-galactosidase A
LDNGLARTPPMGWLHWERFMCNLDCQEEPDSCISEKLFVEMAERMVTEGWKDAGYEYLCIDDCWMAPQRDSEGRLQADPQRFPHGIRQLANHVHSKGLKLGIYADVGNKTCAGFPGSFGYYDIDAQTFADWGVDLLKFDGCYCDSLENLADGYKHMSLALNKTGRPIVYSCEWPLYMWPFQKPNYTEIRQYCNHWRNFADIDDSWASIKSILDWTSRNQERIVDVAGPGGWNDPDMLVIGNFGLSWDQQVTQMALWAIMAGPLFMSNDLRAISPQAKALLQDKDVIAINQDPLGKQGYQLRKGDNFEVWERPLSGDAWAVAIINRQEIGGPRSYTIPVASLGKGVACNPACFITQLLPVKRKLGFYEATSRLRSHINPTGTVLLQLENTMQTVLKDLA

SEQ ID NO: 335 - DNA, 1197 bp, Artificial Sequence
  variant of human alpha-galactosidase A
ttggataacgggttagcccgtacacctccgatgggttggcttcactgggaaagattcatgtgtaacttagattgccaagaagagcctgacagctgtatctcagagaaactattcgaagagatggctgaacggatggtaactgaaggatggaaggatgctggttatgaatacctatgtattgatgattgctggatggctccacagcgtgattcagaaggtaggttacaagctgacccccagagattcccacatggcatacgtcagcttgcaaaccatgtacacagcaaaggtctaaagttaggcatctacgctgatgtcggaaacaagacatgtgctggtttcccaggttcattcggttactatgacatagatgcgcagacgtttgctgattggggtgttgatttgttgaagtttgatggatgctactgcgattccctggagaacctagccgatgggtacaaacacatgagtcgtgctctaaacaaaactggtaggccgatcgtctatagttgtgaatggcccttgtacatgtggccgtttcagaagccaaactacactgagataagacaatactgtaaccattggcgtaactttgctgacatagatgattcatgggcttcaatcaaatctatcttggattggacttctcgtaaccaggaaagaattgttgatgttgcaggtccaggtggatggaatgaccctgatatgcttgtcatagggaactttgggctatcatgggaccaacaagttacacaaatggctttgtgggcgatcatggccggccccctattcatgtctaatgatctacgtgcgataagcccccaagcaaaggctttacttcaagataaggatgtcatagcgatcaaccaagatcctcttggtaaacaaggttatcaattgagaaaaggtgacaactttgaagtgtgggaaagaccattgtctggagacgcgtgggctgttgctattatcaaccgtcaagagatcggagggccaagatcttacactatccctgtagcctctttgggtaagggtgtcgcgtgcaatcctgcctgcttcattacacaattgcttccagttaagagaaaattgggtttctatgaagcaacctctaggctaagaagtcacattaatcctactggtacggtattgttgcaattggagaacacaatgcaaacctctttgaaagatttgttataa

SEQ ID NO: 336 - protein, 398 aa, Artificial Sequence
  variant of human alpha-galactosidase A
LDNGLARTPPMGWLHWERFMCNLDCQEEPDSCISEKLFEEMAERMVTEGWKDAGYEYLCIDDCWMAPQRDSEGRLQADPQRFPHGIRQLANHVHSKGLKLGIYADVGNKTCAGFPGSFGYYDIDAQTFADWGVDLLKFDGCYCDSLENLADGYKHMSRALNKTGRPIVYSCEWPLYMWPFQKPNYTEIRQYCNHWRNFADIDDSWASIKSILDWTSRNQERIVDVAGPGGWNDPDMLVIGNFGLSWDQQVTQMALWAIMAGPLFMSNDLRAISPQAKALLQDKDVIAINQDPLGKQGYQLRKGDNFEVWERPLSGDAWAVAIINRQEIGGPRSYTIPVASLGKGVACNPACFITQLLPVKRKLGFYEATSRLRSHINPTGTVLLQLENTMQTSLKDLL

SEQ ID NO: 337 - DNA, 1197 bp, Artificial Sequence
  variant of human alpha-galactosidase A
ttggataacgggttagcccgtacacctccgatgggttggcttcactgggaaagattcatgtgtaacttagattgccaagaagagcctgacagctgtatctcagagaaactattcgaagagatggctgaacggatggtaactgaaggatggaaggatgctggttatgaatacctatgtattgatgattgctggatggctccacagcgtgattcagaaggtaggttacaagctgacccccagagattcccacatggcatacgtcagcttgcaaaccatgtacacagcaaaggtctaaagttaggcatctacgctgatgtcggaaacaagacatgtgctggtttcccaggttcattcggttactatgacatagatgcgcagacgtttgctgattggggtgttgatttgttgaagtttgatggatgctactgcgattccctggagaacctagccctggggtacaaacacatgagtcgtgctctaaacaaaactggtaggccgatcgtctatagttgtgaatggcccttgtacatgtggccgtttcagaagccaaactacactgagataagacaatactgtaaccattggcgtaactttgctgacatagatgattcatgggcttcaatcaaatctatcttggattggacttctaagaaccaggaaagaattgttgatgttgcaggtccaggtggatggaatgaccctgatatgcttgtcatagggaactttgggctatcatgggaccaacaagttacacaaatggctttgtgggcgatcatggccggccccctattcatgtctaatgatctacgtgcgataagcccccaagcaaaggctttacttcaagacaaggatgtcatagcgatcaaccaagatcctcttggtaaacaaggttatcaattgagaaaaggtgacaactttgaagtgtgggaaagaccattgtctggagacgcgtgggctgttgctattatcaaccgtcaagagatcggagggccaagatcttacactatccctgtagcctctttgggtggtggtcaggcgtgcaatcctgcctgcttcattacacaattgcttccagttaagagaaaattgggtttctatgaagcaacctctaggctaagaagtcacattaatcctactggtacggtattgttgcaattggagaacacaatgcaaaccgtattgaaagatttgctgtaa

SEQ ID NO: 338 - protein, 398 aa, Artificial Sequence
  variant of human alpha-galactosidase A
LDNGLARTPPMGWLHWERFMCNLDCQEEPDSCISEKLFEEMAERMVTEGWKDAGYEYLCIDDCWMAPQRDSEGRLQADPQRFPHGIRQLANHVHSKGLKLGIYADVGNKTCAGFPGSFGYYDIDAQTFADWGVDLLKFDGCYCDSLENLALGYKHMSRALNKTGRPIVYSCEWPLYMWPFQKPNYTEIRQYCNHWRNFADIDDSWASIKSILDWTSKNQERIVDVAGPGGWNDPDMLVIGNFGLSWDQQVTQMALWAIMAGPLFMSNDLRAISPQAKALLQDKDVIAINQDPLGKQGYQLRKGDNFEVWERPLSGDAWAVAIINRQEIGGPRSYTIPVASLGGGQACNPACFITQLLPVKRKLGFYEATSRLRSHINPTGTVLLQLENTMQTVLKDLL

SEQ ID NO: 339 - DNA, 1197 bp, Artificial Sequence
  variant of human alpha-galactosidase A
ttggataacgggttagcccgtacacctccgatgggttggcttcactgggaaagattcatgtgtaacttagattgccaagaagagcctgacagctgtatctcagagaaactattcgaggagatggctgaacggatggtaactgaaggatggaaggatgctggttatgaatacctatgtattgatgattgctggatggctccacagcgtgattcagaaggtaggttacaagctgacccccagagattcccacatggcatacgtcagcttgcaaaccatgtacacagcaaaggtctaaagttaggcatctacgctgatgtcggaaacaagacatgtgctggtttcccaggttcattcggttactatgacatagatgcgcagacgtttgctgagtggggtgttgatttgttgaagtttgatggatgctactgcgattccctggagaacctagccgatgggtacaaacacatgagtcgtgctctaaacaaaactggtaggccgatcgtctatagttgtgaatggcccttgtacatgtggccgtttcagaagccaaactacactgagataagacaatactgtaaccattggcgtaactttgctgacatagatgattcatgggcttcaatcaaatctatcttggattggacttctcgcaaccaggaaagaattgttgatgttgcaggtccaggtggatggaatgaccctgatatgcttgtcatagggaactttgggctatcatgggaccaacaagttacacaaatggctttgtgggcgatcatggccggccccctattcatgtctaatgatctacgtgcgataagcccccaagcaaaggctttacttcaagataaggatgtcatagcgatcaaccaagatcctcttggtaaacaaggttatcaattgagaaaaggtgacaactttgaagtgtgggaaagaccattgtctggagacgcgtgggctgttgctattatcaaccgtcaagagatcggagggccaagatcttacactatcccggtagcctctttgggtaagggtgttgcgtgcaatcctgcctgcttcattacacaattgcttccagttaagagaaaattgggtttctatgaagcaacctctaggctaagaagtcacattaatcctactggtacggtattgttgcaattggagaacacaatgcaaacctctttgaaagatttgttataa

SEQ ID NO: 340 - protein, 398 aa, Artificial Sequence
  variant of human alpha-galactosidase A
LDNGLARTPPMGWLHWERFMCNLDCQEEPDSCISEKLFEEMAERMVTEGWKDAGYEYLCIDDCWMAPQRDSEGRLQADPQRFPHGIRQLANHVHSKGLKLGIYADVGNKTCAGFPGSFGYYDIDAQTFAEWGVDLLKFDGCYCDSLENLADGYKHMSRALNKTGRPIVYSCEWPLYMWPFQKPNYTEIRQYCNHWRNFADIDDSWASIKSILDWTSRNQERIVDVAGPGGWNDPDMLVIGNFGLSWDQQVTQMALWAIMAGPLFMSNDLRAISPQAKALLQDKDVIAINQDPLGKQGYQLRKGDNFEVWERPLSGDAWAVAIINRQEIGGPRSYTIPVASLGKGVACNPACFITQLLPVKRKLGFYEATSRLRSHINPTGTVLLQLENTMQTSLKDLL

SEQ ID NO: 341 - DNA, 1197 bp, Artificial Sequence
  variant of human alpha-galactosidase A
ttggataacgggttagcccgtacacctccgatgggttggcttcactgggaaagattcatgtgtaacttagattgccaagaagagcctgacagctgtatctcagagaaactattcgaagagatggctgaacggatggtaactgaaggatggaaggatgctggttatgaatacctatgtattgatgattgctggatggctccacagcgtgattcagaaggtaggttacaagctgacccccagagattcccacatggcatacgtcagcttgcaaaccatgtacacagcaaaggtctaaagttaggcatctacgctgatgtcggaaacaagacatgtgctggtttcccaggttcattcggttactatgacatagatgcgcagacgtttgctgattggggtgttgatttgttgaagtttgatggatgctactgcgattccctggagaacctagccctggggtacaaacacatgagtctggctctaaacaaaactggtaggccgatcgtctatagttgtgaatggcccttgtacatgtggccgtttcagaagccaaactacactgagataagacaatactgtaaccattggcgtaactttgctgacatagatgattcatgggcttcaatcaaatctatcttggattggacttctcgtaaccaggaaagaattgttgatgttgcaggtccaggtggatggaatgaccctgatatgcttgtcatagggaactttgggctatcatgggaccaacaagttacacaaatggctttgtgggcgatcatggccggccccctattcatgtctaatgatctacgtgcgataagcccccaagcaaaggctttacttcaagataaggatgtcatagcgatcaaccaagatcctcttggtaaacaaggttatcaattgagaaaaggtgacaactttgaagtgtgggaaagaccattgtctggagacgcgtgggctgttgctattatcaaccgtcaagagatcggagggccaagatcttacactatcccggtagcctctttgggtaagggtgttgcgtgcaatcctgcctgcttcattacacaattgcttccagttaagagaaaattgggtttctatgaagcaacctctaggctaagaagtcacattaatcctactggtacggtattgttgcaattggagaacacaatgcaaaccgtattgaaagatttgctgtaa

SEQ ID NO: 342 - protein, 398 aa, Artificial Sequence
  variant of human alpha-galactosidase A
LDNGLARTPPMGWLHWERFMCNLDCQEEPDSCISEKLFEEMAERMVTEGWKDAGYEYLCIDDCWMAPQRDSEGRLQADPQRFPHGIRQLANHVHSKGLKLGIYADVGNKTCAGFPGSFGYYDIDAQTFADWGVDLLKFDGCYCDSLENLALGYKHMSLALNKTGRPIVYSCEWPLYMWPFQKPNYTEIRQYCNHWRNFADIDDSWASIKSILDWTSRNQERIVDVAGPGGWNDPDMLVIGNFGLSWDQQVTQMALWAIMAGPLFMSNDLRAISPQAKALLQDKDVIAINQDPLGKQGYQLRKGDNFEVWERPLSGDAWAVAIINRQEIGGPRSYTIPVASLGKGVACNPACFITQLLPVKRKLGFYEATSRLRSHINPTGTVLLQLENTMQTVLKDLL

SEQ ID NO: 343 - DNA, 1197 bp, Artificial Sequence
  variant of human alpha-galactosidase A
ttggataacgggttagcccgtacacctccgatgggttggcttcactgggaaagattcatgtgtaacttagattgccaagaagagcctgacagctgtatctcagagaaactattcgaggagatggctgaacggatggtaactgaaggatggaaggatgctggttatgaatacctatgtattgatgattgctggatggctccacagcgtgattcagaaggtaggttacaagctgacccccagagattcccacatggcatacgtcagcttgcaaaccatgtacacagcaaaggtctaaagttaggcatctacgctgatgtcggaaacaagacatgtgctggtttcccaggttcattcggttactatgacatagatgcgcagacgtttgctgattggggtgttgatttgttgaagtttgatggatgctactgcgattccctggagaacctagccgatgggtacaaacacatgagtctggctctaaacaaaactggtaggccgatcgtctatagttgtgaatggcccttgtacatgtggccgtttcagaagccaaactacactgagataagacaatactgtaaccattggcgtaactttgctgacatagatgattcatgggcttcaatcaaatctatcttggattggacttctaagaaccaggaaagaattgttgatgttgcaggtccaggtggatggaatgaccctgatatgcttgtcatagggaactttgggctatcatgggaccaacaagttacacaaatggctttgtgggcgatcatggccggccccctattcatgtctaatgatctacgtgcgataagcccccaagcaaaggctttacttcaagataaggatgtcatagcgatcaaccaagatcctcttggtaaacaaggttatcaattgagaaaaggtgacaactttgaagtgtgggaaagaccattgtctggagacgcgtgggctgttgctattatcaaccgtcaagagatcggagggccaagatcttacactatcccggtagcctctttgggtaagggtgttgcgtgcaatcctgcctgcttcattacacaattgcttccagttaagagaaaattgggtttctatgaagcaacctctaggctaagaagtcacattaatcctactggtacggtattgttgcaattggagaacacaatgcaaacctctttgaaagatttgttataa

SEQ ID NO: 344 - protein, 398 aa, Artificial Sequence
  variant of human alpha-galactosidase A
LDNGLARTPPMGWLHWERFMCNLDCQEEPDSCISEKLFEEMAERMVTEGWKDAGYEYLCIDDCWMAPQRDSEGRLQADPQRFPHGIRQLANHVHSKGLKLGIYADVGNKTCAGFPGSFGYYDIDAQTFADWGVDLLKFDGCYCDSLENLADGYKHMSLALNKTGRPIVYSCEWPLYMWPFQKPNYTEIRQYCNHWRNFADIDDSWASIKSILDWTSKNQERIVDVAGPGGWNDPDMLVIGNFGLSWDQQVTQMALWAIMAGPLFMSNDLRAISPQAKALLQDKDVIAINQDPLGKQGYQLRKGDNFEVWERPLSGDAWAVAIINRQEIGGPRSYTIPVASLGKGVACNPACFITQLLPVKRKLGFYEATSRLRSHINPTGTVLLQLENTMQTSLKDLL

SEQ ID NO: 345 - DNA, 1197 bp, Artificial Sequence
  variant of human alpha-galactosidase A
ttggataacgggttagcccgtacacctccgatgggttggcttcactgggaaagattcatgtgtaacttagattgccaagaagagcctgacagctgtatctcagagaaactattcgaagagatggctgaacggatggtaactgaaggatggaaggatgctggttatgaatacctatgtattgatgattgctggatggctccacagcgtgattcagaaggtaggttacaagctgacccccagagattcccacatggcatacgtcagcttgcaaaccatgtacacagcaaaggtctaaagttaggcatctacgctgatgtcggaaacaagacatgtgctggtttcccaggttcattcggttactatgacatagatgcgcagacgtttgctgagtggggtgttgatttgttgaagtttgatggatgctactgcgattccctggagaacctagccgatgggtacaaacacatgagtcgtgctctaaacaaaactggtaggccgatcgtctatagttgtgaatggcccttgtacatgtggccgtttcagaagccaaactacactgagataagacaatactgtaaccattggcgtaactttgctgacatagatgattcatgggcttcaatcaaatctatcttggattggacttctcgcaaccaggaaagaattgttgatgttgcaggtccaggtggatggaatgaccctgatatgcttgtcatagggaactttgggctatcatgggaccaacaagttacacaaatggctttgtgggcgatcatggccggccccctattcatgtctaatgatctacgtgcgataagcccccaagcaaaggctttacttcaagataaggatgtcatagcgatcaaccaagatcctcttggtaaacaaggttatcaattgagaaaaggtgacaactttgaagtgtgggaaagaccattgtctggagacgcgtgggctgttgctattatcaaccgtcaagagatcggagggccaagatcttacactatcccggtagcctctttgggtaagggtgttgcgtgcaatcctgcctgcttcattacacaattgcttccagttaagagaaaattgggtttctatgaagcaacctctaggctaagaagtcacattaatcctactggtacggtattgttgcaattggagaacacaatgcaaaccgtattgaaagatttgctgtaa

SEQ ID NO: 346 - protein, 398 aa, Artificial Sequence
  variant of human alpha-galactosidase A
LDNGLARTPPMGWLHWERFMCNLDCQEEPDSCISEKLFEEMAERMVTEGWKDAGYEYLCIDDCWMAPQRDSEGRLQADPQRFPHGIRQLANHVHSKGLKLGIYADVGNKTCAGFPGSFGYYDIDAQTFAEWGVDLLKFDGCYCDSLENLADGYKHMSRALNKTGRPIVYSCEWPLYMWPFQKPNYTEIRQYCNHWRNFADIDDSWASIKSILDWTSRNQERIVDVAGPGGWNDPDMLVIGNFGLSWDQQVTQMALWAIMAGPLFMSNDLRAISPQAKALLQDKDVIAINQDPLGKQGYQLRKGDNFEVWERPLSGDAWAVAIINRQEIGGPRSYTIPVASLGKGVACNPACFITQLLPVKRKLGFYEATSRLRSHINPTGTVLLQLENTMQTVLKDLL

SEQ ID NO: 347 - DNA, 1197 bp, Artificial Sequence
  variant of human alpha-galactosidase A
ttggataacgggttagcccgtacacctccgatgggttggcttcactgggaaagattcatgtgtaacttagattgccaagaagagcctgacagctgtatctcagagaaactattcgtggagatggctgaacggatggtaactgaaggatggaaggatgctggttatgaatacctatgtattgatgattgctggatggctccacagcgtgattcagaaggtaggttacaagctgacccccagagattcccacatggcatacgtcagcttgcaaaccatgtacacagcaaaggtctaaagttaggcatctacgctgatgtcggaaacaagacatgtgctggtttcccaggttcattcggttactatgacatagatgcgcagacgtttgctgattggggtgttgatttgttgaagtttgatggatgctactgcgattccctggagaacctagccctggggtacaaacacatgagtctggctctaaacaaaactggtaggccgatcgtctatagttgtgaatggcccttgtacatgtggccgtttcagaagccaaactacactgagataagacaatactgtaaccattggcgtaactttgctgacatagatgattcatgggcttcaatcaaatctatcttggattggacttctcgtaaccaggaaagaattgttgatgttgcaggtccaggtggatggaatgaccctgatatgcttgtcatagggaactttgggctatcatgggaccaacaagttacacaaatggctttgtgggcgatcatggccggccccctattcatgtctaatgatctacgtgcgataagcccccaagcaaaggctttacttcaagataaggatgtcatagcgatcaaccaagatcctcttggtaaacaaggttatcaattgagaaaaggtgacaactttgaagtgtgggaaagaccattgtctggagacgcgtgggctgttgctattatcaaccgtcaagagatcggagggccaagatcttacactatcccggtagcctctttgggtaagggtgttgcgtgcaatcctgcctgcttcattacacaattgcttccagttaagagaaaattgggtttctatgaagcaacctctaggctaagaagtcacattaatcctactggtacggtattgttgcaattggagaacacaatgcaaacctctttgaaagatttgttataa

SEQ ID NO: 348 - protein, 398 aa, Artificial Sequence
  variant of human alpha-galactosidase A
LDNGLARTPPMGWLHWERFMCNLDCQEEPDSCISEKLFVEMAERMVTEGWKDAGYEYLCIDDCWMAPQRDSEGRLQADPQRFPHGIRQLANHVHSKGLKLGIYADVGNKTCAGFPGSFGYYDIDAQTFADWGVDLLKFDGCYCDSLENLALGYKHMSLALNKTGRPIVYSCEWPLYMWPFQKPNYTEIRQYCNHWRNFADIDDSWASIKSILDWTSRNQERIVDVAGPGGWNDPDMLVIGNFGLSWDQQVTQMALWAIMAGPLFMSNDLRAISPQAKALLQDKDVIAINQDPLGKQGYQLRKGDNFEVWERPLSGDAWAVAIINRQEIGGPRSYTIPVASLGKGVACNPACFITQLLPVKRKLGFYEATSRLRSHINPTGTVLLQLENTMQTSLKDLL

SEQ ID NO: 349 - DNA, 1197 bp, Artificial Sequence
  variant of human alpha-galactosidase A
ttggataacgggttagcccgtacacctccgatgggttggcttcactgggaaagattcatgtgtaacttagattgccaagaagagcctgacagctgtatctcagagaaactattcgaagagatggctgaacggatggtaactgaaggatggaaggatgctggttatgaatacctatgtattgatgattgctggatggctccacagcgtgattcagaaggtaggttacaagctgacccccagagattcccacatggcatacgtcagcttgcaaaccatgtacacagcaaaggtctaaagttaggcatctacgctgatgtcggaaacaagacatgtgctggtttcccaggttcattcggttactatgacatagatgcgcagacgtttgctgattggggtgttgatttgttgaagtttgatggatgctactgcgattccctggagaacctagccctggggtacaaacacatgagtctggctctaaacaaaactggtaggccgatcgtctatagttgtgaatggcccttgtacatgtggccgtttcagaagccaaactacactgagataagacaatactgtaaccattggcgtaactttgctgacatagatgattcatgggcttcaatcaaatctatcttggattggacttctcgtaaccaggaaagaattgttgatgttgcaggtccaggtggatggaatgaccctgatatgcttgtcatagggaactttgggctatcatgggaccaacaagttacacaaatggctttgtgggcgatcatggccggccccctattcatgtctaatgatctacgtgcgataagcccccaagcaaaggctttacttcaagataaggatgtcatagcgatcaaccaagatcctcttggtaaacaaggttatcaattgagaaaaggtgacaactttgaagtgtgggaaagaccattgtctggagacgcgtgggctgttgctattatcaaccgtcaagagatcggagggccaagatcttacactatccctgtagcctctttgggtaagggtcaggcgtgcaatcctgcctgcttcattacacaattgcttccagttaagagaaaattgggtttctatgaagcaacctctaggctaagaagtcacattaatcctactggtacggtattgttgcaattggagaacacaatgcaaaccgtattgaaagatttggcgtaa

SEQ ID NO: 350 - protein, 398 aa, Artificial Sequence
  variant of human alpha-galactosidase A
LDNGLARTPPMGWLHWERFMCNLDCQEEPDSCISEKLFEEMAERMVTEGWKDAGYEYLCIDDCWMAPQRDSEGRLQADPQRFPHGIRQLANHVHSKGLKLGIYADVGNKTCAGFPGSFGYYDIDAQTFADWGVDLLKFDGCYCDSLENLALGYKHMSLALNKTGRPIVYSCEWPLYMWPFQKPNYTEIRQYCNHWRNFADIDDSWASIKSILDWTSRNQERIVDVAGPGGWNDPDMLVIGNFGLSWDQQVTQMALWAIMAGPLFMSNDLRAISPQAKALLQDKDVIAINQDPLGKQGYQLRKGDNFEVWERPLSGDAWAVAIINRQEIGGPRSYTIPVASLGKGQACNPACFITQLLPVKRKLGFYEATSRLRSHINPTGTVLLQLENTMQTVLKDLA

SEQ ID NO: 351 - DNA, 1197 bp, Artificial Sequence
  variant of human alpha-galactosidase A
ttggataacgggttagcccgtacacctccgatgggttggcttcactgggaaagattcatgtgtaacttagattgccaagaagagcctgacagctgtatctcagagaaactattcgtggagatggctgaacggatggtagatgaaggatggaaggatgctggttatgaatacctatgtattgatgattgctggatggctccacagcgtgattcagaaggtaggttacaagctgacccccagagattcccacatggcatacgtcagcttgcaaaccatgtacacagcaaaggtctaaagttaggcatctacgctgatgtcggaaacaagacatgtgctggtttcccaggttcattcggttactatgacatagatgcgcagacgtttgctgattggggtgttgatttgttgaagtttgatggatgctactgcgattccctggagaacctagccgatgggtacaaacacatgagtctggctctaaacaaaactggtaggccgatcgtctatagttgtgaatggcccttgtacatgtggccgtttcagaagccaaactacactgagataagacaatactgtaaccattggcgtaactttgctgacatagatgattcatgggcttcaatcaaatctatcttggattggacttctcgtaaccaggaaagaattgttgatgttgcaggtccaggtggatggaatgaccctgatatgcttgtcatagggaactttgggctatcatgggaccaacaagttacacaaatggctttgtgggcgatcatggccggccccctattcatgtctaatgatctacgtgcgataagcccccaagcaaaggctttacttcaagataaggatgtcatagcgatcaaccaagatcctcttggtaaacaaggttatcaattgagaaaaggtgacaactttgaagtgtgggaaagaccattgtctggagacgcgtgggctgttgctattatcaaccgtcaagagatcggagggccaagatcttacactatcccggtagcctctttgggtaagggtgttgcgtgcaatcctgcctgcttcattacacaattgcttccagttaagagaaaattgggtttctatgaagcaacctctaggctaagaagtcacattaatcctactggtacggtattgttgcaattggagaacacaatgcaaacctctttgaaagatttgttataa

SEQ ID NO: 352 - protein, 398 aa, Artificial Sequence
  variant of human alpha-galactosidase A
LDNGLARTPPMGWLHWERFMCNLDCQEEPDSCISEKLFVEMAERMVDEGWKDAGYEYLCIDDCWMAPQRDSEGRLQADPQRFPHGIRQLANHVHSKGLKLGIYADVGNKTCAGFPGSFGYYDIDAQTFADWGVDLLKFDGCYCDSLENLADGYKHMSLALNKTGRPIVYSCEWPLYMWPFQKPNYTEIRQYCNHWRNFADIDDSWASIKSILDWTSRNQERIVDVAGPGGWNDPDMLVIGNFGLSWDQQVTQMALWAIMAGPLFMSNDLRAISPQAKALLQDKDVIAINQDPLGKQGYQLRKGDNFEVWERPLSGDAWAVAIINRQEIGGPRSYTIPVASLGKGVACNPACFITQLLPVKRKLGFYEATSRLRSHINPTGTVLLQLENTMQTSLKDLL

SEQ ID NO: 353 - DNA, 1197 bp, Artificial Sequence
  variant of human alpha-galactosidase A
ttggataacgggttagcccgtacacctccgatgggttggcttcactgggaaagattcatgtgtaacttagattgccaagaagagcctgacagctgtatctcagagaaactattcgaagagatggctgaacggatggtaactgaaggatggaaggatgctggttatgaatacctatgtattgatgattgctggatggctccacagcgtgattcagaaggtaggttacaagctgacccccagagattcccacatggcatacgtcagcttgcaaaccatgtacacagcaaaggtctaaagttaggcatctacgctgatgtcggaaacaagacatgtgctggtttcccaggttcattcggttactatgacatagatgcgcagacgtttgctgattggggtgttgatttgttgaagtttgatggatgctactgcgattccctggagaacctagccgatgggtacaaacacatgagtcgtgctctaaacaaaactggtaggccgatcgtctatagttgtgaatggcccttgtacatgtggccgtttcagaagccaaactacactgagataagacaatactgtaaccattggcgtaactttgctgacatagatgattcatgggcttcaatcaaatctatcttggattggacttctcgtaaccaggaaagaattgttgatgttgcaggtccaggtggatggaatgaccctgatatgcttgtcatagggaactttgggctatcatgggaccaacaagttacacaaatggctttgtgggcgatcatggccggccccctattcatgtctaatgatctacgtgcgataagcccccaagcaaaggctttacttcaagataaggatgtcatagcgatcaaccaagatcctcttggtaaacaaggttatcaattgagaaaaggtgacaactttgaagtgtgggaaagaccattgtctggagacgcgtgggctgttgctattatcaaccgtcaagagatcggagggccaagatcttacactatcccggtagcctctttgggtaagggtgttgcgtgcaatcctgcctgcttcattacacaattgcttccagttaagagaaaattgggtttctatgaagcaacctctaggctaagaagtcacattaatcctactggtacggtattgttgcaattggagaacacaatgcaaaccgtattgaaagatttgctgtaa

SEQ ID NO: 354 - protein, 398 aa, Artificial Sequence
  variant of human alpha-galactosidase A
LDNGLARTPPMGWLHWERFMCNLDCQEEPDSCISEKLFEEMAERMVTEGWKDAGYEYLCIDDCWMAPQRDSEGRLQADPQRFPHGIRQLANHVHSKGLKLGIYADVGNKTCAGFPGSFGYYDIDAQTFADWGVDLLKFDGCYCDSLENLADGYKHMSRALNKTGRPIVYSCEWPLYMWPFQKPNYTEIRQYCNHWRNFADIDDSWASIKSILDWTSRNQERIVDVAGPGGWNDPDMLVIGNFGLSWDQQVTQMALWAIMAGPLFMSNDLRAISPQAKALLQDKDVIAINQDPLGKQGYQLRKGDNFEVWERPLSGDAWAVAIINRQEIGGPRSYTIPVASLGKGVACNPACFITQLLPVKRKLGFYEATSRLRSHINPTGTVLLQLENTMQTVLKDLL

SEQ ID NO: 355 - DNA, 1197 bp, Artificial Sequence
  variant of human alpha-galactosidase A
ttggataacgggttagcccgtacacctccgatgggttggcttcactgggaaagattcatgtgtaacttagattgccaagaagagcctgacagctgtatctcagagaaactattcgaagagatggctgaacggatggtaactgaaggatggaaggatgctggttatgaatacctagcgattgatgattgctggatggctccacagcgtgattcagaaggtaggttacaagctgacccccagagattcccacatggcatacgtcagcttgcaaaccatgtacacagcaaaggtctaaagttaggcatctacgctgatgtcggaaacaagacatgtgctggtttcccaggttcattcggttactatgacatagatgcgcagacgtttgctgattggggtgttgatttgttgaagtttgatggatgctacagcgattccctggagaacctagccgatgggtacaaacacatgagtctggctctaaacaaaactggtaggccgatcgtctatagttgtgaatggcccttgtacatgtggccgtttcagaagccaaactacactgagataagacaatactgtaaccattggcgtaactttgctgacatagatgattcatgggcttcaatcaaatctatcttggattggacttctcgtaaccaggaaagaattgttgatgttgcaggtccaggtggatggaatgaccctgatatgcttgtcatagggaactttgggctatcatgggaccaacaagttacacaaatggctttgtgggcgatcatggccggccccctattcatgtctaatgatctacgtgcgataagcccccaagcaaaggctttacttcaagataaggatgtcatagcgatcaaccaagatcctcttggtaaacaaggttatcaattgagaaaaggtgacaactttgaagtgtgggaaagaccattgtctggagacgcgtgggctgttgctattatcaaccgtcaagagatcggagggccaagaagctacactatcccggtagcctctttgggtaagggtgttgcgtgcaatcctgcctgcttcattacacaattgcttccagttaagagaaaattgggtttctatgaagcaacctctaggctaagaagtcacattaatcctactggtacggtattgttgcaattggagaacacaatgcaaacctctttgaaagatttgttataa

SEQ ID NO: 356 - protein, 398 aa, Artificial Sequence
  variant of human alpha-galactosidase A
LDNGLARTPPMGWLHWERFMCNLDCQEEPDSCISEKLFEEMAERMVTEGWKDAGYEYLAIDDCWMAPQRDSEGRLQADPQRFPHGIRQLANHVHSKGLKLGIYADVGNKTCAGFPGSFGYYDIDAQTFADWGVDLLKFDGCYSDSLENLADGYKHMSLALNKTGRPIVYSCEWPLYMWPFQKPNYTEIRQYCNHWRNFADIDDSWASIKSILDWTSRNQERIVDVAGPGGWNDPDMLVIGNFGLSWDQQVTQMALWAIMAGPLFMSNDLRAISPQAKALLQDKDVIAINQDPLGKQGYQLRKGDNFEVWERPLSGDAWAVAIINRQEIGGPRSYTIPVASLGKGVACNPACFITQLLPVKRKLGFYEATSRLRSHINPTGTVLLQLENTMQTSLKDLL

SEQ ID NO: 357 - DNA, 1197 bp, Artificial Sequence
  variant of human alpha-galactosidase A
ttggataacgggttagcccgtacacctccgatgggttggcttcactgggaaagattcatgtgtaacttagattgccaagaagagcctgacagctgtatctcagagaaactattcgaagagatggctgaacggatggtaactgaaggatggaaggatgctggttatgaatacctatgtattgatgattgctggatggctccacagcgtgattcagaaggtaggttacaagctgacccccagagattcccacatggcatacgtcagcttgcaaaccatgtacacagcaaaggtctaaagttaggcatctacgctgatgtcggaaacaagacatgtgctggtttcccaggttcattcggttactatgacatagatgcgcagacgtttgctgattggggtgttgatttgttgaagtttgatggatgctactgcgattccctggagaacctagccgatgggtacaaacacatgagtctggctctaaacaaaactggtaggccgatcgtctatagttgtgaatggcccttgtacatgtggccgtttcagaagccaaactacactgagataagacaatactgtaaccattggcgtaactttgctgacatagatgattcatgggcttcaatcaaatctatcttggattggacttctcgtaaccaggaaagaattgttgatgttgcaggtccaggtggatggaatgaccctgatatgcttgtcatagggaactttgggctatcatgggaccaacaagttacacaaatggctttgtgggcgatcatggccggccccctattcatgtctaatgatctacgtaatataagcccccaagcaaaggctttacttcaagataaggatgtcatagcgatcaaccaagatcctcttggtaaacaaggttatcaattgagaaaaggtgacaactttgaagtgtgggaaagaccattgtctggagacgcgtgggctgttgctattatcaaccgtcaagagatcggagggccaagatcttacactatcccggtagcctctttgggtaagggtgttgcgtgcaatcctgcctgcttcattacacaattgcttccagttaagagaaaattgggtttctatgaagcaacctctaggctaagaagtcacattaatcctactggtacggtattgttgcaattggagaacacaatgcagacctctttgaaagatttgttataa

SEQ ID NO: 358 - protein, 398 aa, Artificial Sequence
  variant of human alpha-galactosidase A
LDNGLARTPPMGWLHWERFMCNLDCQEEPDSCISEKLFEEMAERMVTEGWKDAGYEYLCIDDCWMAPQRDSEGRLQADPQRFPHGIRQLANHVHSKGLKLGIYADVGNKTCAGFPGSFGYYDIDAQTFADWGVDLLKFDGCYCDSLENLADGYKHMSLALNKTGRPIVYSCEWPLYMWPFQKPNYTEIRQYCNHWRNFADIDDSWASIKSILDWTSRNQERIVDVAGPGGWNDPDMLVIGNFGLSWDQQVTQMALWAIMAGPLFMSNDLRNISPQAKALLQDKDVIAINQDPLGKQGYQLRKGDNFEVWERPLSGDAWAVAIINRQEIGGPRSYTIPVASLGKGVACNPACFITQLLPVKRKLGFYEATSRLRSHINPTGTVLLQLENTMQTSLKDLL

SEQ ID NO: 359 - DNA, 1197 bp, Artificial Sequence
  variant of human alpha-galactosidase A
ttggataacgggttagcccgtacacctccgatgggttggcttcactgggaaagattcatgtgtaacttagattgccaagaagagcctgacagctgtatctcagagaaactattcgaagagatggctgaacggatggtaactgaaggatggaaggatgctggttatgaatacctatgtattgatgattgctggatggctccacagcgtgattcagaaggtaggttacaagctgacccccagagattcccacatggcatacgtcagcttgcaaaccatgtacacagcaaaggtctaaagttaggcatctacgctgatgtcggaaacaagacatgtgctggtttcccaggttcattcggttactatgacatagatgcgcagacgtttgctgattggggtgttgatttgttgaagtttgatggatgctactgcgattccctggagaacctagccgatgggtacaaacacatgagtctggctctaaacaaaactggtaggccgatcgtctatagttgtgaatggcccttgtacatgtggccgtttcagaagccaaactacactgagataagacaatactgtaaccattggcgtaactttgctgacataaatgattcatgggcttcaatcaaatctatcttggattggacttctcgtaaccaggaaagaattgttgatgttgcaggtccaggtggatggaatgaccctgatatgcttgtcatagggaactttgggctatcatgggaccaacaagttacacaaatggctttgtgggcgatcatggccggccccctattcatgtctaatgatctacgtgcgataagcccccaagcaaaggctttacttcaagataaggatgtcatagcgatcaaccaagatcctcttggtaaacaaggttatcaattgagaaaaggtgacaactttgaagtgtgggaaagaccattgtctggagacgcgtgggctgttgctattatcaaccgtcaagagatcggagggccaagatcttacactatcccggtagcctctttgggtaagggtgttgcgtgcaatcctgcctgcttcattacacaattgcttccagttaagagaaaattgggtttctatgaagcaacctctaggctaagaagtcacattaatcctactggtacggtattgttgcaattggagaacacaatgcagacctctttgaaagatttgttataa

SEQ ID NO: 360 - protein, 398 aa, Artificial Sequence
  variant of human alpha-galactosidase A
LDNGLARTPPMGWLHWERFMCNLDCQEEPDSCISEKLFEEMAERMVTEGWKDAGYEYLCIDDCWMAPQRDSEGRLQADPQRFPHGIRQLANHVHSKGLKLGIYADVGNKTCAGFPGSFGYYDIDAQTFADWGVDLLKFDGCYCDSLENLADGYKHMSLALNKTGRPIVYSCEWPLYMWPFQKPNYTEIRQYCNHWRNFADINDSWASIKSILDWTSRNQERIVDVAGPGGWNDPDMLVIGNFGLSWDQQVTQMALWAIMAGPLFMSNDLRAISPQAKALLQDKDVIAINQDPLGKQGYQLRKGDNFEVWERPLSGDAWAVAIINRQEIGGPRSYTIPVASLGKGVACNPACFITQLLPVKRKLGFYEATSRLRSHINPTGTVLLQLENTMQTSLKDLL

SEQ ID NO: 361 - DNA, 1197 bp, Artificial Sequence
  variant of human alpha-galactosidase A
ttggataacgggttagcccgtacacctccgatgggttggcttcactgggaaagattcatgtgtaacttatcgtgccaagaagagcctgacagctgtatctcagagaaactattcgaagagatggctgaacggatggtaactgaaggatggaaggatgctggttatgaatacctatgtattgatgattgctggatggctccacagcgtgattcagaaggtaggttacaagctgacccccagagattcccacatggcatacgtcagcttgcaaaccatgtacacagcaaaggtctaaagttaggcatctacgctgatgtcggaaacaagacatgtgctggtttcccaggttcattcggttactatgacatagatgcgcagacgtttgctgattggggtgttgatttgttgaagtttgatggatgctactgcgattccctggagaacctagccgatgggtacaaacacatgagtctggctctaaacaaaactggtaggccgatcgtctatagttgtgaatggcccttgtacatgtggccgtttcagaagccaaactacactgagataagacaatactgtaaccattggcgtaactttgctgacataaatgattcatgggcttcaatcaaatctatcttggattggacttctcgtaaccaggaaagaattgttgatgttgcaggtccaggtggatggaatgaccctgatatgcttgtcatagggaactttgggctatcatgggaccaacaagttacacaaatggctttgtgggcgatcatggccggccccctattcatgtctaatgatctacgtgcgataagcccccaagcaaaggctttacttcaagataaggatgtcatagcgatcaaccaagatcctcttggtaaacaaggttatcaattgagaaaaggtgacaactttgaagtgtgggaaagaccattgtctggagacgcgtgggctgttgctattatcaaccgtcaagagatcggagggccaagatcttacactatcccggtagcctctttgggtaagggtgttgcgtgcaatcctgcctgcttcattacacaattgcttccagttaagagaaaattgggtttctatgaagcaacctctaggctaagaagtcacattaatcctactggtacggtattgttgcaattggagaacacaatgcaaacctctttgaaagatttgttataa

SEQ ID NO: 362 - protein, 398 aa, Artificial Sequence
  variant of human alpha-galactosidase A
LDNGLARTPPMGWLHWERFMCNLSCQEEPDSCISEKLFEEMAERMVTEGWKDAGYEYLCIDDCWMAPQRDSEGRLQADPQRFPHGIRQLANHVHSKGLKLGIYADVGNKTCAGFPGSFGYYDIDAQTFADWGVDLLKFDGCYCDSLENLADGYKHMSLALNKTGRPIVYSCEWPLYMWPFQKPNYTEIRQYCNHWRNFADINDSWASIKSILDWTSRNQERIVDVAGPGGWNDPDMLVIGNFGLSWDQQVTQMALWAIMAGPLFMSNDLRAISPQAKALLQDKDVIAINQDPLGKQGYQLRKGDNFEVWERPLSGDAWAVAIINRQEIGGPRSYTIPVASLGKGVACNPACFITQLLPVKRKLGFYEATSRLRSHINPTGTVLLQLENTMQTSLKDLL

SEQ ID NO: 363 - DNA, 1197 bp, Artificial Sequence
  variant of human alpha-galactosidase A
ttggataacgggttagcccgtacacctccgatgggttggcttcactgggaaagattcatgtgtaacttagattgccaagaagagcctgacagctgtatctcagagaaactattcgaagagatggctgaacggatggtaactgaaggatggaaggatgctggttatgaatacctatgtattgatgattgctggatggctccacagcgtgattcagaaggtaggttacaagctgacccccagagattcccacatggcatacgtcagcttgcaaaccatgtacacagcaaaggtctaaagttaggcatctacgctgatgtcggaaacaagacatgtgctggtttcccaggttcattcggttactatgacatagatgcgcagacgtttgctgattggggtgttgatttgttgaagtttgatggatgctactgcgattccctggagaacctagccgatgggtacaaacacatgagtctggctctaaacaaaactggtaggccgatcgtctatagttgtgaatggcccttgtacatgtggccgtttcagaagccaaactacactgagataagacaatactgtaaccattggcgtaactttgctgacatagatgattcatgggcttcaatcaaatctatcttggattggacttctcgtaaccaggaaagaattgttgatgttgcaggtccaggtggatggaatgaccctgatatgcttgtcatagggaactttgggctatcatgggaccaacaagttacacaaatggctttgtgggcgatcatggccggccccctattcatgtctaatgatctacgtgcgataagcccccaagcaaaggctttacttcaagataaggatgtcatagcgatcaaccaagatcctcttggtaaacaaggttatcaattgagaaaaggtgacaactttgaagtgtgggaaagaccattgtctggagacgcgtgggctgttgctattatcaaccgtcaagagatcggagggccaagaaactacactatcccggtagcctctttgggtaagggtgttgcgtgcaatcctgcctgcttcattacacaattgcttccagttaagagaaaattgggtttctatgaagcaacctctaggctaagaagtcacattaatcctactggtacggtattgttgcaattggagaacacaatgcaaacctctttgaaagatttgttataa

SEQ ID NO: 364 - protein, 398 aa, Artificial Sequence
  variant of human alpha-galactosidase A
LDNGLARTPPMGWLHWERFMCNLDCQEEPDSCISEKLFEEMAERMVTEGWKDAGYEYLCIDDCWMAPQRDSEGRLQADPQRFPHGIRQLANHVHSKGLKLGIYADVGNKTCAGFPGSFGYYDIDAQTFADWGVDLLKFDGCYCDSLENLADGYKHMSLALNKTGRPIVYSCEWPLYMWPFQKPNYTEIRQYCNHWRNFADIDDSWASIKSILDWTSRNQERIVDVAGPGGWNDPDMLVIGNFGLSWDQQVTQMALWAIMAGPLFMSNDLRAISPQAKALLQDKDVIAINQDPLGKQGYQLRKGDNFEVWERPLSGDAWAVAIINRQEIGGPRNYTIPVASLGKGVACNPACFITQLLPVKRKLGFYEATSRLRSHINPTGTVLLQLENTMQTSLKDLL

SEQ ID NO: 365 - DNA, 1197 bp, Artificial Sequence
  variant of human alpha-galactosidase A
ttggataacgggttagcccgtacacctccgatgggttggcttcactgggaaagattcatgtgtaacttagattgccaagaagagcctgacagctgtatctcagagaaactattcgaagagatggctgaacggatggtaactgaaggatggaaggatgctggttatgaatacctatgcattgatgattgctggatggctccacagcgtgattcagaaggtaggttacaagctgacccccagagattcccacatggcatacgtcagcttgcaaaccatgtacacagcaaaggtctaaagttaggcatctacgctgatgtcggaaacaagacatgtgctggtttcccaggttcattcggttactatgacatagatgcgcagacgtttgctgattggggtgttgatttgttgaagtttgatggatgctacagcgattccctggagaacctagccgatgggtacaaacacatgagtctggctctaaacaaaactggtaggccgatcgtctatagttgtgaatggcccttgtacatgtggccgtttcagaagccaaactacactgagataagacaatactgtaaccattggcgtaactttgctgacatagatgattcatgggcttcaatcaaatctatcttggattggacttctcgtaaccaggaaagaattgttgatgttgcaggtccaggtggatggaatgaccctgatatgcttgtcatagggaactttgggctatcatgggaccaacaagttacacaaatggctttgtgggcgatcatggccggccccctattcatgtctaatgatctacgtgcgataagcccccaagcaaaggctttacttcaagataaggatgtcatagcgatcaaccaagatcctcttggtaaacaaggttatcaattgagaaaaggtgacaactttgaagtgtgggaaagaccattgtctggagacgcgtgggctgttgctattatcaaccgtcaagagatcggagggccaagaaactacactatcccggtagcctctttgggtaagggtgttgcgtgcaatcctgcctgcttcattacacaattgcttccagttaagagaaaattgggtttctatgaagcaacctctaggctaagaagtcacattaatcctactggtacggtattgttgcaattggagaacacaatgcaaacctctttgaaagatttgttataa

SEQ ID NO: 366 - protein, 398 aa, Artificial Sequence
  variant of human alpha-galactosidase A
LDNGLARTPPMGWLHWERFMCNLDCQEEPDSCISEKLFEEMAERMVTEGWKDAGYEYLCIDDCWMAPQRDSEGRLQADPQRFPHGIRQLANHVHSKGLKLGIYADVGNKTCAGFPGSFGYYDIDAQTFADWGVDLLKFDGCYSDSLENLADGYKHMSLALNKTGRPIVYSCEWPLYMWPFQKPNYTEIRQYCNHWRNFADIDDSWASIKSILDWTSRNQERIVDVAGPGGWNDPDMLVIGNFGLSWDQQVTQMALWAIMAGPLFMSNDLRAISPQAKALLQDKDVIAINQDPLGKQGYQLRKGDNFEVWERPLSGDAWAVAIINRQEIGGPRNYTIPVASLGKGVACNPACFITQLLPVKRKLGFYEATSRLRSHINPTGTVLLQLENTMQTSLKDLL

SEQ ID NO: 367 - DNA, 1197 bp, Artificial Sequence
  variant of human alpha-galactosidase A
ttggataacgggttagcccgtacacctccgatgggttggcttcactgggaaagattcatgtgtaacttagattgccaagaagagcctgacagctgtatctcagagaaactattcgaagagatggctgaacggatggtaactgaaggatggaaggatgctggttatgaatacctatgtattgatgattgctggatggctccacagcgtgattcagaaggtaggttacaagctgacccccagagattcccacatggcatacgtcagcttgcaaaccatgtacacagcaaaggtctaaagttaggcatctacgctgatgtcggaaacaagacatgtgctggtttcccaggttcattcggttactatgacatagatgcgcagacgtttgctgattggggtgttgatttgttgaagtttgatggatgctacagcgattccctggagaacctagccgatgggtacaaacacatgagtctggctctaaacaaaactggtaggccgatcgtctatagttgtgaatggcccttgtacatgtggccgtttcagaagccaaactacactgagataagacaatactgtaaccattggcgtaactttgctgacatagatgattcatgggcttcaatcaaatctatcttggattggacttctcgtaaccaggaaagaattgttgatgttgcaggtccaggtggatggaatgaccctgatatgcttgtcatagggaactttgggctatcatgggaccaacaagttacacaaatggctttgtgggcgatcatggccggccccctattcatgtctaatgatctacgtaatataagcccccaagcaaaggctttacttcaagataaggatgtcatagcgatcaaccaagatcctcttggtaaacaaggttatcaattgagaaaaggtgacaactttgaagtgtgggaaagaccattgtctggagacgcgtgggctgttgctattatcaaccgtcaagagatcggagggccaagaagctacactatcccggtagcctctttgggtaagggtgttgcgtgcaatcctgcctgcttcattacacaattgcttccagttaagagaaaattgggtttctatgaagcaacctctaggctaagaagtcacattaatcctactggtacggtattgttgcaattggagaacacaatgcaaacctctttgaaagatttgttataa

SEQ ID NO: 368 - protein, 398 aa, Artificial Sequence
  variant of human alpha-galactosidase A
LDNGLARTPPMGWLHWERFMCNLDCQEEPDSCISEKLFEEMAERMVTEGWKDAGYEYLCIDDCWMAPQRDSEGRLQADPQRFPHGIRQLANHVHSKGLKLGIYADVGNKTCAGFPGSFGYYDIDAQTFADWGVDLLKFDGCYSDSLENLADGYKHMSLALNKTGRPIVYSCEWPLYMWPFQKPNYTEIRQYCNHWRNFADIDDSWASIKSILDWTSRNQERIVDVAGPGGWNDPDMLVIGNFGLSWDQQVTQMALWAIMAGPLFMSNDLRNISPQAKALLQDKDVIAINQDPLGKQGYQLRKGDNFEVWERPLSGDAWAVAIINRQEIGGPRSYTIPVASLGKGVACNPACFITQLLPVKRKLGFYEATSRLRSHINPTGTVLLQLENTMQTSLKDLL

SEQ ID NO: 369 - DNA, 1197 bp, Artificial Sequence
  variant of human alpha-galactosidase A
ttggataacgggttagcccgtacacctccgatgggttggcttcactgggaaagattcatgtgtaacttagattgccaagaagagcctgacagctgtatctcagagaaactattcgaagagatggctgaacggatggtaactgaaggatggaaggatgctggttatgaatacctatgtattgatgattgctggatggctccacagcgtgattcagaaggtaggttacaagctgacccccagagattcccacatggcatacgtcagcttgcaaaccatgtacacagcaaaggtctaaagttaggcatctacgctgatgtcggaaacaagacatgtgctggtttcccaggttcattcggttactatgacatagatgcgcagacgtttgctgattggggtgttgatttgttgaagtttgatggatgctacagcgattccctggagaacctagccgatgggtacaaacacatgagtctggctctaaacaaaactggtaggccgatcgtctatagttgtgaatggcccttgtacatgtggccgtttcagaagccaaactacactgagataagacaatactgtaaccattggcgtaactttgctgacatagatgattcatgggcttcaatcaaatctatcttggattggacttctcgtaaccaggaaagaattgttgatgttgcaggtccaggtggatggaatgaccctgatatgcttgtcatagggaactttgggctatcatgggaccaacaagttacacaaatggctttgtgggcgatcatggccggccccctattcatgtctaatgatctacgtgcgataagcccccaagcaaaggctttacttcaagataaggatgtcatagcgatcaaccaagatcctcttggtaaacaaggttatcaattgagaaaaggtgacaactttgaagtgtgggaaagaccattgtctggagacgcgtgggctgttgctattatcaaccgtcaagagatcggagggccaagaagctacactatcccggtagcctctttgggtaagggtgttgcgtgcaatcctgcctgcttcattacacaattgcttccagttaagagaaaattgggtttctatgaagcaacctctaggctaagaagtcacattaatcctactggtacggtattgttgcaattgaacaacacaatgcagacctctttgaaagatttgttataa

SEQ ID NO: 370 - protein, 398 aa, Artificial Sequence
  variant of human alpha-galactosidase A
LDNGLARTPPMGWLHWERFMCNLDCQEEPDSCISEKLFEEMAERMVTEGWKDAGYEYLCIDDCWMAPQRDSEGRLQADPQRFPHGIRQLANHVHSKGLKLGIYADVGNKTCAGFPGSFGYYDIDAQTFADWGVDLLKFDGCYSDSLENLADGYKHMSLALNKTGRPIVYSCEWPLYMWPFQKPNYTEIRQYCNHWRNFADIDDSWASIKSILDWTSRNQERIVDVAGPGGWNDPDMLVIGNFGLSWDQQVTQMALWAIMAGPLFMSNDLRAISPQAKALLQDKDVIAINQDPLGKQGYQLRKGDNFEVWERPLSGDAWAVAIINRQEIGGPRSYTIPVASLGKGVACNPACFITQLLPVKRKLGFYEATSRLRSHINPTGTVLLQLNNTMQTSLKDLL

SEQ ID NO: 371 - DNA, 1194 bp, Artificial Sequence
  variant of human alpha-galactosidase A
ctggacaatggattggcaaggacgcctaccatgggctggctgcactgggagcgcttcatgtgcaaccttgactgccaggaagagccagattcctgcatcagtgagaagctcttcatggagatggcagagctcatggtctcagaaggctggaaggatgcaggttatgagtacctctgcattgatgactgttggatggctccccaaagagattcagaaggcagacttcaggcagaccctcagcgctttcctcatgggattcgccagctagctaattatgttcacagcaaaggactgaagctagggatttatgcagatgttggaaataaaacctgcgcaggcttccctgggagttttggatactacgacattgatgcccagacctttgctgactggggagtagatctgctaaaatttgatggttgttactgtgacagtttggaaaatttggcagatggttataagcacatgtccttggccctgaataggactggcagaagcattgtgtactcctgtgagtggcctctttatatgtggccctttcaaaagcccaattatacagaaatccgacagtactgcaatcactggcgaaattttgctgacattgatgattcctggaaaagtataaagagtatcttggactggacatcttttaaccaggagagaattgttgatgttgctggaccagggggttggaatgacccagatatgttagtgattggcaactttggcctcagctggaatcagcaagtaactcagatggccctctgggctatcatggctgctcctttattcatgtctaatgacctccgacacatcagccctcaagccaaagctctccttcaggataaggacgtaattgccatcaatcaggaccccttgggcaagcaagggtaccagcttagacagggagacaactttgaagtgtgggaacgacctctctcaggcttagcctgggctgtagctatgataaaccggcaggagattggtggacctcgctcttataccatcgcagttgcttccctgggtaaaggagtggcctgtaatcctgcctgcttcatcacacagctcctccctgtgaaaaggaagctagggttctatgaatggacttcaaggttaagaagtcacataaatcccacaggcactgttttgcttcagctagaaaatacaatgcagatgtcattaaaagacttactt

SEQ ID NO: 372 - protein, 398 aa, Artificial Sequence; identical to SEQ ID NO: 2
  variant of human alpha-galactosidase A

SEQ ID NO: 373 - DNA, 1194 bp, Artificial Sequence
  variant of human alpha-galactosidase A
ctggataatggattggctagaacacctcctatggggtggcttcactgggagaggttcatgtgcaacctggactgtcaggaagaaccagacagctgcatctccgagaagctctttgaggaaatggccgaacgaatggtgactgagggctggaaagatgcaggttacgagtatctgtgtattgacgattgctggatggccccacaacgggattctgagggaagacttcaggctgatccgcagcgcttccctcatggcataaggcagctggcaaaccacgtccacagtaaggggctcaaattgggaatctacgcggacgtgggcaataagacctgtgccggttttccgggatcattcgggtattatgacattgacgcccaaacgtttgctgattggggcgttgacctgctgaaattcgatggttgctactgtgacagcctcgaaaacctggcagacggctacaagcatatgtctctcgccctgaatagaaccggtcggccaatcgtatattcctgcgagtggcctctttacatgtggccatttcagaaaccgaactacacagaaattcgccagtattgcaatcattggaggaacttcgctgatatcgatgactcatgggcctccataaagagcatcttggactggaccagtcggaatcaggagcgaattgtggatgtcgcaggccctggaggatggaacgatccagacatgctggtgatcggcaattttggcctctcttgggaccagcaggttacccaaatggctctgtgggcaattatggccggtcctcttttcatgagcaacgatctgcgcgcgatctcaccacaggcaaaggccctgctccaagacaaagatgtgatagccatcaatcaggacccgttgggaaagcagggctaccagctgagaaaaggcgacaactttgaggtctgggaaaggcctttgagtggagacgcgtgggctgtggccattattaatcggcaagagatcggaggtccacgctcctatacaattcctgtagcatctcttggcaagggcgttgcctgtaacccagcttgcttcatcactcagcttctgccggtgaagagaaaactgggtttctacgaagctaccagcaggctccgatcccacatcaaccctacaggaaccgtcctcttgcagctggagaatacgatgcagacttcactgaaggacctcctg

SEQ ID NO: 374 - protein, 398 aa, Artificial Sequence; identical to SEQ ID NO: 58
  variant of human alpha-galactosidase A

SEQ ID NO: 375 - DNA, 1194 bp, Artificial Sequence
  variant of human alpha-galactosidase A
ctggacaatggattggcaaggacgcctacaatgggctggctgcactgggagcgcttcatgtgcaaccttgactgccaggaagagccagattcctgcatcagtgagaagctcttcatggagatggcagagctcatggtctcagaaggctggaaggatgcaggttatgagtacctctgcattgatgactgttggatggctccccaaagagattcagaaggcagacttcaggcagaccctcagcgctttcctcatgggattcgccagctagctaattatgttcacagcaaaggactgaagctagggatttatgcagatgttggaaataaaacctgcgcaggcttccctgggagttttggatactacgacattgatgcccagacctttgctgactggggagtagatctgctaaaatttgatggttgttactgtgacagtttggaaaatttggcagatggttataagcacatgtccttggccctgaataggactggcagaagcattgtgtactcctgtgagtggcctctttatatgtggccctttcaaaagcccaattatacagaaatccgacagtactgcaatcactggcgaaattttgctgacattgatgattcctggaaaagtataaagagtatcttggactggacatctaggaaccaggagagaattgttgatgttgctggaccagggggttggaatgacccagatatgttagtgattggcaactttggcctcagctgggaccagcaagtaactcagatggccctctgggctatcatggctgctcctttattcatgtctaatgacctccgacacatcagccctcaagccaaagctctccttcaggataaggacgtaattgccatcaatcaggaccccttgggcaagcaagggtaccagcttagacagggagacaactttgaagtgtgggaacgacctctctcaggcgatgcctgggctgtagctattataaaccggcaggagattggtggacctcgctcttataccatccccgttgcttccctgggtaaaggagtggcctgtaatcctgcctgcttcatcacacagctcctccctgtgaaaaggaagctagggttctatgaagctacttcaaggttaagaagtcacataaatcccacaggcactgttttgcttcagctagaaaatacaatgcagatgtcattaaaagacttactt

SEQ ID NO: 376 - protein, 398 aa, Artificial Sequence
  variant of human alpha-galactosidase A
LDNGLARTPTMGWLHWERFMCNLDCQEEPDSCISEKLFMEMAELMVSEGWKDAGYEYLCIDDCWMAPQRDSEGRLQADPQRFPHGIRQLANYVHSKGLKLGIYADVGNKTCAGFPGSFGYYDIDAQTFADWGVDLLKFDGCYCDSLENLADGYKHMSLALNRTGRSIVYSCEWPLYMWPFQKPNYTEIRQYCNHWRNFADIDDSWKSIKSILDWTSRNQERIVDVAGPGGWNDPDMLVIGNFGLSWDQQVTQMALWAIMAAPLFMSNDLRHISPQAKALLQDKDVIAINQDPLGKQGYQLRQGDNFEVWERPLSGDAWAVAIINRQEIGGPRSYTIPVASLGKGVACNPACFITQLLPVKRKLGFYEATSRLRSHINPTGTVLLQLENTMQMSLKDLL

SEQ ID NO: 377 - DNA, 1194 bp, Artificial Sequence
  variant of human alpha-galactosidase A
ctggacaatggattggcaaggacgcctacaatgggctggctgcactgggagcgcttcatgtgcaaccttgactgccaggaagagccagattcctgcatcagtgagaagctcttcatggagatggcagagctcatggtctcagaaggctggaaggatgcaggttatgagtacctctgcattgatgactgttggatggctccccaaagagattcagaaggcagacttcaggcagaccctcagcgctttcctcatgggattcgccagctagctaattatgttcacagcaaaggactgaagctagggatttatgcagatgttggaaataaaacctgcgcaggcttccctgggagttttggatactacgacattgatgcccagacctttgctgactggggagtagatctgctaaaatttgatggttgttactgtgacagtttggaaaatttggcagatggttataagcacatgtccttggccctgaataggactggcagaagcattgtgtactcctgtgagtggcctctttatatgtggccctttcaaaagcccaattatacagaaatccgacagtactgcaatcactggcgaaattttgctgacattgatgattcctggaagagtataaagagtatcttggactggacatcttttaaccaggagagaattgttgatgttgctggaccagggggttggaatgacccagatatgttagtgattggcaactttggcctcagctggaatcagcaagtaactcagatggccctctgggctatcatggctgctcctttattcatgtctaatgacctccgagccatcagccctcaagccaaagctctccttcaggataaggacgtaattgccatcaatcaggaccccttgggcaagcaagggtaccagcttagacagggagacaactttgaagtgtgggaacgacctctctcaggcttagcctgggctgtagctatgataaaccggcaggagattggtggacctcgctcttataccatcgccgttgcttccctgggtaaaggagtggcctgtaatcctgcctgcttcatcacacagctcctccctgtgaaaaggaagctagggttctatgaatggacttcaaggttaagaagtcacataaatcccacaggcactgttttgcttcagctagaaaatacaatgcagatgtcattaaaagacttactt

SEQ ID NO: 378 - protein, 398 aa, Artificial Sequence
  variant of human alpha-galactosidase A
LDNGLARTPTMGWLHWERFMCNLDCQEEPDSCISEKLFMEMAELMVSEGWKDAGYEYLCIDDCWMAPQRDSEGRLQADPQRFPHGIRQLANYVHSKGLKLGIYADVGNKTCAGFPGSFGYYDIDAQTFADWGVDLLKFDGCYCDSLENLADGYKHMSLALNRTGRSIVYSCEWPLYMWPFQKPNYTEIRQYCNHWRNFADIDDSWKSIKSILDWTSFNQERIVDVAGPGGWNDPDMLVIGNFGLSWNQQVTQMALWAIMAAPLFMSNDLRAISPQAKALLQDKDVIAINQDPLGKQGYQLRQGDNFEVWERPLSGLAWAVAMINRQEIGGPRSYTIAVASLGKGVACNPACFITQLLPVKRKLGFYEWTSRLRSHINPTGTVLLQLENTMQMSLKDLL

SEQ ID NO: 379 - DNA, 1194 bp, Artificial Sequence
  variant of human alpha-galactosidase A
ctggacaatggattggcaaggacgcctacaatgggctggctgcactgggagcgcttcatgtgcaaccttgactgccaggaagagccagattcctgcatcagtgagaagctcttcatggagatggcagagctgatggtctctgaaggctggaaggatgcaggttatgagtacctctgcattgatgactgttggatggctccccaaagagattcagaaggcagacttcaggcagaccctcagcgctttcctcatgggattcgccagctagctaattatgttcacagcaaaggactgaagctagggatttatgcagatgttggaaataaaacctgcgcaggcttccctgggagttttggatactacgacattgatgcccagacctttgctgactggggagtagatctgctaaaatttgatggttgttactgtgacagtttggaaaatttggcagatggttataagcacatgtccttggccctgaataggactggcagaagcattgtgtactcctgtgagtggcctctttatatgtggccctttcaaaagcccaattatacagaaatccgacagtactgcaatcactggcgaaattttgctgacattgatgattcctggaaaagtataaagagtatcttggactggacatcttttaaccaggagagaattgttgatgttgctggaccagggggttggaatgacccagatatgttagtgattggcaactttggcctcagctggaatcagcaagtaactcagatggccctctgggctatcatggctgctcctttattcatgtctaatgacctccgagccatcagccctcaagccaaagctctccttcaggataaggacgtaattgccatcaatcaggaccccttgggcaagcaagggtaccagcttagacagggagacaactttgaagtgtgggaacgacctctctcaggcgatgcctgggctgtagctattataaaccggcaggagattggtggacctcgctcttataccatcgccgttgcttccctgggtaaaggagtggcctgtaatcctgcctgcttcatcacacagctcctccctgtgaaaaggaagctagggttctatgaatggacttcaaggttaagaagtcacataaatcccacaggcactgttttgcttcagctagaaaatacaatgcagatgtcattaaaagacttactt

SEQ ID NO: 380 - protein, 398 aa, Artificial Sequence
  variant of human alpha-galactosidase A
LDNGLARTPTMGWLHWERFMCNLDCQEEPDSCISEKLFMEMAELMVSEGWKDAGYEYLCIDDCWMAPQRDSEGRLQADPQRFPHGIRQLANYVHSKGLKLGIYADVGNKTCAGFPGSFGYYDIDAQTFADWGVDLLKFDGCYCDSLENLADGYKHMSLALNRTGRSIVYSCEWPLYMWPFQKPNYTEIRQYCNHWRNFADIDDSWKSIKSILDWTSFNQERIVDVAGPGGWNDPDMLVIGNFGLSWNQQVTQMALWAIMAAPLFMSNDLRAISPQAKALLQDKDVIAINQDPLGKQGYQLRQGDNFEVWERPLSGDAWAVAIINRQEIGGPRSYTIAVASLGKGVACNPACFITQLLPVKRKLGFYEWTSRLRSHINPTGTVLLQLENTMQMSLKDLL

SEQ ID NO: 381 - DNA, 1194 bp, Artificial Sequence
  variant of human alpha-galactosidase A
ctggacaatggattggcaaggacgcctacaatgggctggctgcactgggagcgcttcatgtgcaaccttgactgccaggaagagccagattcctgcatcagtgagaagctcttcatggagatggcagagctgatggtctctgaaggctggaaggatgcaggttatgagtacctctgcattgatgactgttggatggctccccaaagagattcagaaggcagacttcaggcagaccctcagcgctttcctcatgggattcgccagctagctaattatgttcacagcaaaggactgaagctagggatttatgcagatgttggaaataaaacctgcgcaggcttccctgggagttttggatactacgacattgatgcccagacctttgctgactggggagtagatctgctaaaatttgatggttgttactgtgacagtttggaaaatttggcagatggttataagcacatgtccttggccctgaataggactggcagaagcattgtgtactcctgtgagtggcctctttatatgtggccctttcaaaagcccaattatacagaaatccgacagtactgcaatcactggcgaaattttgctgacattgatgattcctggaaaagtataaagagtatcttggactggacatcttttaaccaggagagaattgttgatgttgctggaccagggggttggaatgacccagatatgttagtgattggcaactttggcctcagctggaatcagcaagtaactcagatggccctctgggctatcatggctgctcctttattcatgtctaatgacctccgagccatcagccctcaagccaaagctctccttcaggataaggacgtaattgccatcaatcaggaccccttgggcaagcaagggtaccagcttagaaagggagacaactttgaagtgtgggaacgacctctctcaggcttagcctgggctgtagctattataaaccggcaggagattggtggacctcgctcttataccatcgcagttgcttccctgggtaaaggagtggcctgtaatcctgcctgcttcatcacacagctcctccctgtgaaaaggaagctagggttctatgaatggacttcaaggttaagaagtcacataaatcccacaggcactgttttgcttcagctagaaaatacaatgcagatgtcattaaaagacttactt

SEQ ID NO: 382 - protein, 398 aa, Artificial Sequence
  variant of human alpha-galactosidase A
LDNGLARTPTMGWLHWERFMCNLDCQEEPDSCISEKLFMEMAELMVSEGWKDAGYEYLCIDDCWMAPQRDSEGRLQADPQRFPHGIRQLANYVHSKGLKLGIYADVGNKTCAGFPGSFGYYDIDAQTFADWGVDLLKFDGCYCDSLENLADGYKHMSLALNRTGRSIVYSCEWPLYMWPFQKPNYTEIRQYCNHWRNFADIDDSWKSIKSILDWTSFNQERIVDVAGPGGWNDPDMLVIGNFGLSWNQQVTQMALWAIMAAPLFMSNDLRAISPQAKALLQDKDVIAINQDPLGKQGYQLRKGDNFEVWERPLSGLAWAVAIINRQEIGGPRSYTIAVASLGKGVACNPACFITQLLPVKRKLGFYEWTSRLRSHINPTGTVLLQLENTMQMSLKDLL

SEQ ID NO: 383 - DNA, 1194 bp, Artificial Sequence
  variant of human alpha-galactosidase A
ctggacaatggattggcaaggacgcctacaatgggctggctgcactgggagcgcttcatgtgcaaccttgactgccaggaagagccagattcctgcatcagtgagaagctcttcatggagatggcagagctcatggtctcagaaggctggaaggatgcaggttatgagtacctctgcattgatgactgttggatggctccccaaagagattcagaaggcagacttcaggcagaccctcagcgctttcctcatgggattcgccagctagctaattatgttcacagcaaaggactgaagctagggatttatgcagatgttggaaataaaacctgcgcaggcttccctgggagttttggatactacgacattgatgcccagacctttgctgactggggagtagatctgctaaaatttgatggttgttactgtgacagtttggaaaatttggcagatggttataagcacatgtccttggccctgaataggactggcagaagcattgtgtactcctgtgagtggcctctttatatgtggccctttcaaaagcccaattatacagaaatccgacagtactgcaatcactggcgaaattttgctgacattgatgattcctgggccagtataaagagtatcttggactggacatctaggaaccaggagagaattgttgatgttgctggaccagggggttggaatgacccagatatgttagtgattggcaactttggcctcagctggaatcagcaagtaactcagatggccctctgggctatcatggctgctcctttattcatgtctaatgacctccgagccatcagccctcaagccaaagctctccttcaggataaggacgtaattgccatcaatcaggaccccttgggcaagcaagggtaccagcttagacagggagacaactttgaagtgtgggaacgacctctctcaggcttagcctgggctgtagctatgataaaccggcaggagattggtggacctcgctcttataccatcgcagttgcttccctgggtaaaggagtggcctgtaatcctgcctgcttcatcacacagctcctccctgtgaaaaggaagctagggttctatgaatggacttcaaggttaagaagtcacataaatcccacaggcactgttttgcttcagctagaaaatacaatgcagacctcattaaaagacttactt

SEQ ID NO: 384 - protein, 398 aa, Artificial Sequence
  variant of human alpha-galactosidase A
LDNGLARTPTMGWLHWERFMCNLDCQEEPDSCISEKLFMEMAELMVSEGWKDAGYEYLCIDDCWMAPQRDSEGRLQADPQRFPHGIRQLANYVHSKGLKLGIYADVGNKTCAGFPGSFGYYDIDAQTFADWGVDLLKFDGCYCDSLENLADGYKHMSLALNRTGRSIVYSCEWPLYMWPFQKPNYTEIRQYCNHWRNFADIDDSWASIKSILDWTSRNQERIVDVAGPGGWNDPDMLVIGNFGLSWNQQVTQMALWAIMAAPLFMSNDLRAISPQAKALLQDKDVIAINQDPLGKQGYQLRQGDNFEVWERPLSGLAWAVAMINRQEIGGPRSYTIAVASLGKGVACNPACFITQLLPVKRKLGFYEWTSRLRSHINPTGTVLLQLENTMQTSLKDLL

SEQ ID NO: 385 - DNA, 1194 bp, Artificial Sequence
  variant of human alpha-galactosidase A
ctggacaatggattggcaaggacgcctacaatgggctggctgcactgggagcgcttcatgtgcaaccttgactgccaggaagagccagattcctgcatcagtgagaagctcttcatggagatggcagagcggatggtctctgaaggctggaaggatgcaggttatgagtacctctgcattgatgactgttggatggctccccaaagagattcagaaggcagacttcaggcagaccctcagcgctttcctcatgggattcgccagctagctaattatgttcacagcaaaggactgaagctagggatttatgcagatgttggaaataaaacctgcgcaggcttccctgggagttttggatactacgacattgatgcccagacctttgctgactggggagtagatctgctaaaatttgatggttgttactgtgacagtttggaaaatttggcagatggttataagcacatgtccttggccctgaataggactggcagaagcattgtgtactcctgtgagtggcctctttatatgtggccctttcaaaagcccaattatacagaaatccgacagtactgcaatcactggcgaaattttgctgacattgatgattcctgggccagtataaagagtatcttggactggacatctttcaaccaggagagaattgttgatgttgctggaccagggggttggaatgacccagatatgttagtgattggcaactttggcctcagctggaaccagcaagtaactcagatggccctctgggctatcatggctgctcctttattcatgtctaatgacctccgacacatcagccctcaagccaaagctctccttcaggataaggacgtaattgccatcaatcaggaccccttgggcaagcaagggtaccagcttagacagggagacaactttgaagtgtgggaacgacctctctcaggcttagcctgggctgtagctatgataaaccggcaggagattggtggacctcgctcttataccatccccgttgcttccctgggtaaaggagtggcctgtaatcctgcctgcttcatcacacagctcctccctgtgaaaaggaagctagggttctatgaatggacttcaaggttaagaagtcacataaatcccacaggcactgttttgcttcagctagaaaatacaatgcagatgtcattaaaagacttactt

SEQ ID NO: 386 - protein, 398 aa, Artificial Sequence
  variant of human alpha-galactosidase A
LDNGLARTPTMGWLHWERFMCNLDCQEEPDSCISEKLFMEMAERMVSEGWKDAGYEYLCIDDCWMAPQRDSEGRLQADPQRFPHGIRQLANYVHSKGLKLGIYADVGNKTCAGFPGSFGYYDIDAQTFADWGVDLLKFDGCYCDSLENLADGYKHMSLALNRTGRSIVYSCEWPLYMWPFQKPNYTEIRQYCNHWRNFADIDDSWASIKSILDWTSFNQERIVDVAGPGGWNDPDMLVIGNFGLSWNQQVTQMALWAIMAAPLFMSNDLRHISPQAKALLQDKDVIAINQDPLGKQGYQLRQGDNFEVWERPLSGLAWAVAMINRQEIGGPRSYTIPVASLGKGVACNPACFITQLLPVKRKLGFYEWTSRLRSHINPTGTVLLQLENTMQMSLKDLL

SEQ ID NO: 387 - DNA, 1194 bp, Artificial Sequence
  variant of human alpha-galactosidase A
ctggacaatggattggcaaggacgcctacaatgggctggctgcactgggagcgcttcatgtgcaaccttgactgccaggaagagccagattcctgcatcagtgagaagctcttcatggagatggcagagcggatggtctctgaaggctggaaggatgcaggttatgagtacctctgcattgatgactgttggatggctccccaaagagattcagaaggcagacttcaggcagaccctcagcgctttcctcatgggattcgccagctagctaattatgttcacagcaaaggactgaagctagggatttatgcagatgttggaaataaaacctgcgcaggcttccctgggagttttggatactacgacattgatgcccagacctttgctgactggggagtagatctgctaaaatttgatggttgttactgtgacagtttggaaaatttggcagatggttataagcacatgtccttggccctgaataggactggcagaagcattgtgtactcctgtgagtggcctctttatatgtggccctttcaaaagcccaattatacagaaatccgacagtactgcaatcactggcgaaattttgctgacattgatgattcctggaaaagtataaagagtatcttggactggacatcttttaaccaggagagaattgttgatgttgctggaccagggggttggaatgacccagatatgttagtgattggcaactttggcctcagctgggaccagcaagtaactcagatggccctctgggctatcatggctggtcctttattcatgtctaatgacctccgacacatcagccctcaagccaaagctctccttcaggataaggacgtaattgccatcaatcaggaccccttgggcaagcaagggtaccagcttagaaagggagacaactttgaagtgtgggaacgacctctctcaggcgatgcctgggctgtagctatgataaaccggcaggagattggtggacctcgctcttataccatcgcagttgcttccctgggtaaaggagtggcctgtaatcctgcctgcttcatcacacagctcctccctgtgaaaaggaagctagggttctatgaatggacttcaaggttaagaagtcacataaatcccacaggcactgttttgcttcagctagaaaatacaatgcagatgtcattaaaagacttactt

SEQ ID NO: 388 - protein, 398 aa, Artificial Sequence
  variant of human alpha-galactosidase A
LDNGLARTPTMGWLHWERFMCNLDCQEEPDSCISEKLFMEMAERMVSEGWKDAGYEYLCIDDCWMAPQRDSEGRLQADPQRFPHGIRQLANYVHSKGLKLGIYADVGNKTCAGFPGSFGYYDIDAQTFADWGVDLLKFDGCYCDSLENLADGYKHMSLALNRTGRSIVYSCEWPLYMWPFQKPNYTEIRQYCNHWRNFADIDDSWKSIKSILDWTSFNQERIVDVAGPGGWNDPDMLVIGNFGLSWDQQVTQMALWAIMAGPLFMSNDLRHISPQAKALLQDKDVIAINQDPLGKQGYQLRKGDNFEVWERPLSGDAWAVAMINRQEIGGPRSYTIAVASLGKGVACNPACFITQLLPVKRKLGFYEWTSRLRSHINPTGTVLLQLENTMQMSLKDLL

SEQ ID NO: 389 - DNA, 1194 bp, Artificial Sequence
  variant of human alpha-galactosidase A
ctggacaatggattggcaaggacgcctacaatgggctggctgcactgggagcgcttcatgtgcaaccttgactgccaggaagagccagattcctgcatcagtgagaagctcttcatggagatggcagagcggatggtctctgaaggctggaaggatgcaggttatgagtacctctgcattgatgactgttggatggctccccaaagagattcagaaggcagacttcaggcagaccctcagcgctttcctcatgggattcgccagctagctaattatgttcacagcaaaggactgaagctagggatttatgcagatgttggaaataaaacctgcgcaggcttccctgggagttttggatactacgacattgatgcccagacctttgctgactggggagtagatctgctaaaatttgatggttgttactgtgacagtttggaaaatttggcagatggttataagcacatgtccttggccctgaataggactggcagaagcattgtgtactcctgtgagtggcctctttatatgtggccctttcaaaagcccaattatacagaaatccgacagtactgcaatcactggcgaaattttgctgacattgatgattcctggaaaagtataaagagtatcttggactggacatctttcaaccaggagagaattgttgatgttgctggaccagggggttggaatgacccagatatgttagtgattggcaactttggcctcagctgggaccagcaagtaactcagatggccctctgggctatcatggctggtcctttattcatgtctaatgacctccgacacatcagccctcaagccaaagctctccttcaggataaggacgtaattgccatcaatcaggaccccttgggcaagcaagggtaccagcttagaaagggagacaactttgaagtgtgggaacgacctctctcaggcgatgcctgggctgtagctattataaaccggcaggagattggtggacctcgctcttataccatcgccgttgcttccctgggtaaaggagtggcctgtaatcctgcctgcttcatcacacagctcctccctgtgaaaaggaagctagggttctatgaatggacttcaaggttaagaagtcacataaatcccacaggcactgttttgcttcagctagaaaatacaatgcagatgtcattaaaagacttactt

SEQ ID NO: 390 - protein, 398 aa, Artificial Sequence
  variant of human alpha-galactosidase A
LDNGLARTPTMGWLHWERFMCNLDCQEEPDSCISEKLFMEMAERMVSEGWKDAGYEYLCIDDCWMAPQRDSEGRLQADPQRFPHGIRQLANYVHSKGLKLGIYADVGNKTCAGFPGSFGYYDIDAQTFADWGVDLLKFDGCYCDSLENLADGYKHMSLALNRTGRSIVYSCEWPLYMWPFQKPNYTEIRQYCNHWRNFADIDDSWKSIKSILDWTSFNQERIVDVAGPGGWNDPDMLVIGNFGLSWDQQVTQMALWAIMAGPLFMSNDLRHISPQAKALLQDKDVIAINQDPLGKQGYQLRKGDNFEVWERPLSGDAWAVAIINRQEIGGPRSYTIAVASLGKGVACNPACFITQLLPVKRKLGFYEWTSRLRSHINPTGTVLLQLENTMQMSLKDLL

SEQ ID NO: 391 - DNA, 1194 bp, Artificial Sequence
  variant of human alpha-galactosidase A
ctggacaatggattggcaaggacgcctacaatgggctggctgcactgggagcgcttcatgtgcaaccttgactgccaggaagagccagattcctgcatcagtgagaagctcttcatggagatggcagagcggatggtcactgaaggctggaaggatgcaggttatgagtacctctgcattgatgactgttggatggctccccaaagagattcagaaggcagacttcaggcagaccctcagcgctttcctcatgggattcgccagctagctaattatgttcacagcaaaggactgaagctagggatttatgcagatgttggaaataaaacctgcgcaggcttccctgggagttttggatactacgacattgatgcccagacctttgctgactggggagtagatctgctaaaatttgatggttgttactgtgacagtttggaaaatttggcagatggttataagcacatgtccttggccctgaataggactggcagaagcattgtgtactcctgtgagtggcctctttatatgtggccctttcaaaagcccaattatacagaaatccgacagtactgcaatcactggcgaaattttgctgacattgatgattcctgggccagtataaagagtatcttggactggacatctaggaaccaggagagaattgttgatgttgctggaccagggggttggaatgacccagatatgttagtgattggcaactttggcctcagctgggaccagcaagtaactcagatggccctctgggctatcatggctgctcctttattcatgtctaatgacctccgagccatcagccctcaagccaaagctctccttcaggataaggacgtaattgccatcaatcaggaccccttgggcaagcaagggtaccagcttagacagggagacaactttgaagtgtgggaacgacctctctcaggcctcgcctgggctgtagctattataaaccggcaggagattggtggacctcgctcttataccatcgccgttgcttccctgggtaaaggagtggcctgtaatcctgcctgcttcatcacacagctcctccctgtgaaaaggaagctagggttctatgaatggacttcaaggttaagaagtcacataaatcccacaggcactgttttgcttcagctagaaaatacaatgcagatgtcattaaaagacttactt

SEQ ID NO: 392 - protein, 398 aa, Artificial Sequence
  variant of human alpha-galactosidase A
LDNGLARTPTMGWLHWERFMCNLDCQEEPDSCISEKLFMEMAERMVTEGWKDAGYEYLCIDDCWMAPQRDSEGRLQADPQRFPHGIRQLANYVHSKGLKLGIYADVGNKTCAGFPGSFGYYDIDAQTFADWGVDLLKFDGCYCDSLENLADGYKHMSLALNRTGRSIVYSCEWPLYMWPFQKPNYTEIRQYCNHWRNFADIDDSWASIKSILDWTSRNQERIVDVAGPGGWNDPDMLVIGNFGLSWDQQVTQMALWAIMAAPLFMSNDLRAISPQAKALLQDKDVIAINQDPLGKQGYQLRQGDNFEVWERPLSGLAWAVAIINRQEIGGPRSYTIAVASLGKGVACNPACFITQLLPVKRKLGFYEWTSRLRSHINPTGTVLLQLENTMQMSLKDLL

SEQ ID NO: 393 - DNA, 1194 bp, Artificial Sequence
  variant of human alpha-galactosidase A
ctggacaatggattggcaaggacgcctaccatgggctggctgcactgggagcgcttcatgtgcaaccttgactgccaggaagagccagattcctgcatcagtgagaagctcttcatggagatggcagagcggatggtcactgaaggctggaaggatgcaggttatgagtacctctgcattgatgactgttggatggctccccaaagagattcagaaggcagacttcaggcagaccctcagcgctttcctcatgggattcgccagctagctaattatgttcacagcaaaggactgaagctagggatttatgcagatgttggaaataaaacctgcgcaggcttccctgggagttttggatactacgacattgatgcccagacctttgctgactggggagtagatctgctaaaatttgatggttgttactgtgacagtttggaaaatttggcagatggttataagcacatgtccttggccctgaataggactggcagaagcattgtgtactcctgtgagtggcctctttatatgtggccctttcaaaagcccaattatacagaaatccgacagtactgcaatcactggcgaaattttgctgacattgatgattcctggaaaagtataaagagtatcttggactggacatcttttaaccaggagagaattgttgatgttgctggaccagggggttggaatgacccagatatgttagtgattggcaactttggcctcagctgggaccagcaagtaactcagatggccctctgggctatcatggctgctcctttattcatgtctaatgacctccgacacatcagccctcaagccaaagctctccttcaggataaggacgtaattgccatcaatcaggaccccttgggcaagcaagggtaccagcttagacagggagacaactttgaagtgtgggaacgacctctctcaggcctcgcctgggctgtagctattataaaccggcaggagattggtggacctcgctcttataccatcgcagttgcttccctgggtaaaggagtggcctgtaatcctgcctgcttcatcacacagctcctccctgtgaaaaggaagctagggttctatgaagctacttcaaggttaagaagtcacataaatcccacaggcactgttttgcttcagctagaaaatacaatgcagatgtcattaaaagacttactt

SEQ ID NO: 394 - protein, 398 aa, Artificial Sequence
  variant of human alpha-galactosidase A
LDNGLARTPTMGWLHWERFMCNLDCQEEPDSCISEKLFMEMAERMVTEGWKDAGYEYLCIDDCWMAPQRDSEGRLQADPQRFPHGIRQLANYVHSKGLKLGIYADVGNKTCAGFPGSFGYYDIDAQTFADWGVDLLKFDGCYCDSLENLADGYKHMSLALNRTGRSIVYSCEWPLYMWPFQKPNYTEIRQYCNHWRNFADIDDSWKSIKSILDWTSFNQERIVDVAGPGGWNDPDMLVIGNFGLSWDQQVTQMALWAIMAAPLFMSNDLRHISPQAKALLQDKDVIAINQDPLGKQGYQLRQGDNFEVWERPLSGLAWAVAIINRQEIGGPRSYTIAVASLGKGVACNPACFITQLLPVKRKLGFYEATSRLRSHINPTGTVLLQLENTMQMSLKDLL

SEQ ID NO: 395 - DNA, 1194 bp, Artificial Sequence
  variant of human alpha-galactosidase A
ctggacaatggattggcaaggacgcctacaatgggctggctgcactgggagcgcttcatgtgcaaccttgactgccaggaagagccagattcctgcatcagtgagaagctcttcatggagatggcagagcggatggtcactgaaggctggaaggatgcaggttatgagtacctctgcattgatgactgttggatggctccccaaagagattcagaaggcagacttcaggcagaccctcagcgctttcctcatgggattcgccagctagctaattatgttcacagcaaaggactgaagctagggatttatgcagatgttggaaataaaacctgcgcaggcttccctgggagttttggatactacgacattgatgcccagacctttgctgactggggagtagatctgctaaaatttgatggttgttactgtgacagtttggaaaatttggcagatggttataagcacatgtccttggccctgaataggactggcagaagcattgtgtactcctgtgagtggcctctttatatgtggccctttcaaaagcccaattatacagaaatccgacagtactgcaatcactggcgaaattttgctgacattgatgattcctggaaaagtataaagagtatcttggactggacatctttcaaccaggagagaattgttgatgttgctggaccagggggttggaatgacccagatatgttagtgattggcaactttggcctcagctggaaccagcaagtaactcagatggccctctgggctatcatggctgctcctttattcatgtctaatgacctccgacacatcagccctcaagccaaagctctccttcaggataaggacgtaattgccatcaatcaggaccccttgggcaagcaagggtaccagcttagaaagggagacaactttgaagtgtgggaacgacctctctcaggcgatgcctgggctgtagctattataaaccggcaggagattggtggacctcgctcttataccatcgcagttgcttccctgggtaaaggagtggcctgtaatcctgcctgcttcatcacacagctcctccctgtgaaaaggaagctagggttctatgaatggacttcaaggttaagaagtcacataaatcccacaggcactgttttgcttcagctagaaaatacaatgcagatgtcattaaaagacttactt

SEQ ID NO: 396 - protein, 398 aa, Artificial Sequence
  variant of human alpha-galactosidase A
LDNGLARTPTMGWLHWERFMCNLDCQEEPDSCISEKLFMEMAERMVTEGWKDAGYEYLCIDDCWMAPQRDSEGRLQADPQRFPHGIRQLANYVHSKGLKLGIYADVGNKTCAGFPGSFGYYDIDAQTFADWGVDLLKFDGCYCDSLENLADGYKHMSLALNRTGRSIVYSCEWPLYMWPFQKPNYTEIRQYCNHWRNFADIDDSWKSIKSILDWTSFNQERIVDVAGPGGWNDPDMLVIGNFGLSWNQQVTQMALWAIMAAPLFMSNDLRHISPQAKALLQDKDVIAINQDPLGKQGYQLRKGDNFEVWERPLSGDAWAVAIINRQEIGGPRSYTIAVASLGKGVACNPACFITQLLPVKRKLGFYEWTSRLRSHINPTGTVLLQLENTMQMSLKDLL

SEQ ID NO: 397 - DNA, 1251 bp, Artificial Sequence
  variant of human alpha-galactosidase A
atggaatggagctgggtctttctcttcttcctgtcagtaacgactggtgtccactccctggacaatggattggcaaggacgcctacaatgggctggctgcactgggagcgcttcatgtgcaaccttgactgccaggaagagccagattcctgcatcagtgagaagctcttcatggagatggcagagcggatggtcactgaaggctggaaggatgcaggttatgagtacctctgcattgatgactgttggatggctccccaaagagattcagaaggcagacttcaggcagaccctcagcgctttcctcatgggattcgccagctagctaatcatgttcacagcaaaggactgaagctagggatttatgcagatgttggaaataaaacctgcgcaggcttccctgggagttttggatactacgacattgatgcccagacctttgctgactggggagtagatctgctaaaatttgatggttgttactgtgacagtttggaaaatttggcagatggttataagcacatgtccttggccctgaataggactggcagaagcattgtgtactcctgtgagtggcctctttatatgtggccctttcaaaagcccaattatacagaaatccgacagtactgcaatcactggcgaaattttgctgacattgatgattcctgggccagtataaagagtatcttggactggacatctaggaaccaggagagaattgttgatgttgctggaccagggggttggaatgacccagatatgttagtgattggcaactttggcctcagctggaaccagcaagtaactcagatggccctctgggctatcatggctgctcctttattcatgtctaatgacctccgacacatcagccctcaagccaaagctctccttcaggataaggacgtaattgccatcaatcaggaccccttgggcaagcaagggtaccagcttagacagggagacaactttgaagtgtgggaacgacctctctcaggcgatgcctgggctgtagctattataaaccggcaggagattggtggacctcgctcttataccatcgcagttgcttccctgggtaaaggagtggcctgtaatcctgcctgcttcatcacacagctcctccctgtgaaaaggaagctagggttctatgaatggacttcaaggttaagaagtcacataaatcccacaggcactgttttgcttcagctagaaaatacaatgcagatgtcattaaaagacttactt

SEQ ID NO: 398 - protein, 417 aa, Artificial Sequence
  variant of human alpha-galactosidase A
MEWSWVFLFFLSVTTGVHSLDNGLARTPTMGWLHWERFMCNLDCQEEPDSCISEKLFMEMAERMVTEGWKDAGYEYLCIDDCWMAPQRDSEGRLQADPQRFPHGIRQLANHVHSKGLKLGIYADVGNKTCAGFPGSFGYYDIDAQTFADWGVDLLKFDGCYCDSLENLADGYKHMSLALNRTGRSIVYSCEWPLYMWPFQKPNYTEIRQYCNHWRNFADIDDSWASIKSILDWTSRNQERIVDVAGPGGWNDPDMLVIGNFGLSWNQQVTQMALWAIMAAPLFMSNDLRHISPQAKALLQDKDVIAINQDPLGKQGYQLRQGDNFEVWERPLSGDAWAVAIINRQEIGGPRSYTIAVASLGKGVACNPACFITQLLPVKRKLGFYEWTSRLRSHINPTGTVLLQLENTMQMSLKDLL

SEQ ID NO: 399 - DNA, 1251 bp, Artificial Sequence
  variant of human alpha-galactosidase A
atggaatggagctgggtctttctcttcttcctgtcagtaacgactggtgtccactccctggacaatggattggcaaggacgcctacaatgggctggctgcactgggagcgcttcatgtgcaaccttgactgccaggaagagccagattcctgcatcagtgagaagctcttcatggagatggcagagcggatggtcactgaaggctggaaggatgcaggttatgagtacctctgcattgatgactgttggatggctccccaaagagattcagaaggcagacttcaggcagaccctcagcgctttcctcatgggattcgccagctagctaatcatgttcacagcaaaggactgaagctagggatttatgcagatgttggaaataaaacctgcgcaggcttccctgggagttttggatactacgacattgatgcccagacctttgctgactggggagtagatctgctaaaatttgatggttgttactgtgacagtttggaaaatttggcagatggttataagcacatgtccttggccctgaataggactggcagaagcattgtgtactcctgtgagtggcctctttatatgtggccctttcaaaagcccaattatacagaaatccgacagtactgcaatcactggcgaaattttgctgacattgatgattcctggaaaagtataaagagtatcttggactggacatcttttaaccaggagagaattgttgatgttgctggaccagggggttggaatgacccagatatgttagtgattggcaactttggcctcagctgggaccagcaagtaactcagatggccctctgggctatcatggctggtcctttattcatgtctaatgacctccgagccatcagccctcaagccaaagctctccttcaggataaggacgtaattgccatcaatcaggaccccttgggcaagcaagggtaccagcttagacagggagacaactttgaagtgtgggaacgacctctctcaggcgatgcctgggctgtagctatgataaaccggcaggagattggtggacctcgctcttataccatccccgttgcttccctgggtaaaggagtggcctgtaatcctgcctgcttcatcacacagctcctccctgtgaaaaggaagctagggttctatgaagctacttcaaggttaagaagtcacataaatcccacaggcactgttttgcttcagctagaaaatacaatgcagatgtcattaaaagacttactt

SEQ ID NO: 400 - protein, 417 aa, Artificial Sequence
  variant of human alpha-galactosidase A
MEWSWVFLFFLSVTTGVHSLDNGLARTPTMGWLHWERFMCNLDCQEEPDSCISEKLFMEMAERMVTEGWKDAGYEYLCIDDCWMAPQRDSEGRLQADPQRFPHGIRQLANHVHSKGLKLGIYADVGNKTCAGFPGSFGYYDIDAQTFADWGVDLLKFDGCYCDSLENLADGYKHMSLALNRTGRSIVYSCEWPLYMWPFQKPNYTEIRQYCNHWRNFADIDDSWKSIKSILDWTSFNQERIVDVAGPGGWNDPDMLVIGNFGLSWDQQVTQMALWAIMAGPLFMSNDLRAISPQAKALLQDKDVIAINQDPLGKQGYQLRQGDNFEVWERPLSGDAWAVAMINRQEIGGPRSYTIPVASLGKGVACNPACFITQLLPVKRKLGFYEATSRLRSHINPTGTVLLQLENTMQMSLKDLL

SEQ ID NO: 401 - DNA, 1194 bp, Artificial Sequence
  variant of human alpha-galactosidase A
ctggacaatggattggcaaggacgcctacaatgggctggctgcactgggagcgcttcatgtgcaaccttgactgccaggaagagccagattcctgcatcagtgagaagctcttcatggagatggcagagcggatggtctctgaaggctggaaggatgcaggttatgagtacctatgcattgatgactgttggatggctccccaaagagattcagaaggcagacttcaggcagaccctcagcgctttcctcatgggattcgccagctagctaatcatgttcacagcaaaggactgaagctagggatttatgcagatgttggaaataaaacctgcgcaggcttccctgggagttttggatactacgacattgatgcccagacctttgctgactggggagtagatctgctaaaatttgatggttgttactgtgacagtttggaaaatttggcagatggttataagcacatgtccttggccctgaataggactggcagaagcattgtgtactcctgtgagtggcctctttatatgtggccctttcaaaagcccaattatacagaaatccgacagtactgcaatcactggcgaaattttgctgacattgatgattcctgggccagtataaagagtatcttggactggacatctttcaaccaggagagaattgttgatgttgctggaccagggggttggaatgacccagatatgttagtgattggcaactttggcctcagctgggaccagcaagtaactcagatggccctctgggctatcatggctgctcctttattcatgtctaatgacctccgacacatcagccctcaagccaaagctctccttcaggataaggacgtaattgccatcaatcaggaccccttgggcaagcaagggtaccagcttagacagggagacaactttgaagtgtgggaacgacctctctcaggcttagcctgggctgtagctatgataaaccggcaggagattggtggacctcgctcttataccatcgccgttgcttccctgggtaaaggagtggcctgtaatcctgcctgcttcatcacacagctcctccctgtgaaaaggaagctagggttctatgaagctacttcaaggttaagaagtcacataaatcccacaggcactgttttgcttcagctagaaaatacaatgcagatgtcattaaaagacttactt

SEQ ID NO: 402 - protein, 398 aa, Artificial Sequence
  variant of human alpha-galactosidase A
LDNGLARTPTMGWLHWERFMCNLDCQEEPDSCISEKLFMEMAERMVSEGWKDAGYEYLCIDDCWMAPQRDSEGRLQADPQRFPHGIRQLANHVHSKGLKLGIYADVGNKTCAGFPGSFGYYDIDAQTFADWGVDLLKFDGCYCDSLENLADGYKHMSLALNRTGRSIVYSCEWPLYMWPFQKPNYTEIRQYCNHWRNFADIDDSWASIKSILDWTSFNQERIVDVAGPGGWNDPDMLVIGNFGLSWDQQVTQMALWAIMAAPLFMSNDLRHISPQAKALLQDKDVIAINQDPLGKQGYQLRQGDNFEVWERPLSGLAWAVAMINRQEIGGPRSYTIAVASLGKGVACNPACFITQLLPVKRKLGFYEATSRLRSHINPTGTVLLQLENTMQMSLKDLL

SEQ ID NO: 403 - DNA, 1194 bp, Artificial Sequence
  variant of human alpha-galactosidase A
ctggacaatggattggcaaggacgcctacaatgggctggctgcactgggagcgcttcatgtgcaaccttgactgccaggaagagccagattcctgcatcagtgagaagctcttcatggagatggcagagctgatggtctctgaaggctggaaggatgcaggttatgagtacctctgcattgatgactgttggatggctccccaaagagattcagaaggcagacttcaggcagaccctcagcgctttcctcatgggattcgccagatagctaattatgttcacagcaaaggactgaagctagggatttatgcagatgttggaaataaaacctgcgcaggcttccctgggagttttggatactacgacattgatgcccagacctttgctgactggggagtagatctgctaaaatttgatggttgttactgtgacagtttggaaaatttggcagatggttataagcacatgtccttggccctgaataggactggcagaagcattgtgtactcctgtgagtggcctctttatatgtggccctttcaaaagcccaattatacagaaatccgacagtactgcaatcactggcgaaattttgctgacattgatgattcctggaagagtataaagagtatcttggactggacatctaggaaccaggagagaattgttgatgttgctggaccagggggttggaatgacccagatatgttagtgattggcaactttggcctcagctgggaccagcaagtaactcagatggccctctgggctatcatggctggtcctttattcatgtctaatgacctccgacacatcagccctcaagccaaagctctccttcaggataaggacgtaattgccatcaatcaggaccccttgggcaagcaagggtaccagcttagaaagggagacaactttgaagtgtgggaacgacctctctcaggcgatgcctgggctgtagctatgataaaccggcaggagattggtggacctcgctcttataccatcgcagttgcttccctgggtaaaggagtggcctgtaatcctgcctgcttcatcacacagctcctccctgtgaaaaggaagctagggttctatgaatggacttcaaggttaagaagtcacataaatcccacaggcactgttttgcttcagctagaaaatacaatgcagatgtcattaaaagacttactt

SEQ ID NO: 404 - protein, 398 aa, Artificial Sequence
  variant of human alpha-galactosidase A
LDNGLARTPTMGWLHWERFMCNLDCQEEPDSCISEKLFMEMAELMVSEGWKDAGYEYLCIDDCWMAPQRDSEGRLQADPQRFPHGIRQIANYVHSKGLKLGIYADVGNKTCAGFPGSFGYYDIDAQTFADWGVDLLKFDGCYCDSLENLADGYKHMSLALNRTGRSIVYSCEWPLYMWPFQKPNYTEIRQYCNHWRNFADIDDSWKSIKSILDWTSRNQERIVDVAGPGGWNDPDMLVIGNFGLSWDQQVTQMALWAIMAGPLFMSNDLRHISPQAKALLQDKDVIAINQDPLGKQGYQLRKGDNFEVWERPLSGDAWAVAMINRQEIGGPRSYTIAVASLGKGVACNPACFITQLLPVKRKLGFYEWTSRLRSHINPTGTVLLQLENTMQMSLKDLL

SEQ ID NO: 405 - DNA, 1194 bp, Artificial Sequence
  variant of human alpha-galactosidase A
ctggacaatggattggcaaggacgcctacaatgggctggctgcactgggagcgcttcatgtgcaaccttgactgccaggaagagccagattcctgcatcagtgagaagctcttcgaggagatggcagagcggatggtctctgaaggctggaaggatgcaggttatgagtacctctgcattgatgactgttggatggctccccaaagagattcagaaggcagacttcaggcagaccctcagcgctttcctcatgggattcgccagctagctaatcatgttcacagcaaaggactgaagctagggatttatgcagatgttggaaataaaacctgcgcaggcttccctgggagttttggatactacgacattgatgcccagacctttgctgactggggagtagatctgctaaaatttgatggttgttactgtgacagtttggaaaatttggcagatggttataagcacatgtccttggccctgaataggactggcagaagcattgtgtactcctgtgagtggcctctttatatgtggccctttcaaaagcccaattatacagaaatccgacagtactgcaatcactggcgaaattttgctgacattgatgattcctggaagagtataaagagtatcttggactggacatctaggaaccaggagagaattgttgatgttgctggaccagggggttggaatgacccagatatgttagtgattggcaactttggcctcagctggaatcagcaagtaactcagatggccctctgggctatcatggctgctcctttattcatgtctaatgacctccgacacatcagccctcaagccaaagctctccttcaggataaggacgtaattgccatcaatcaggaccccttgggcaagcaagggtaccagcttagacagggagacaactttgaagtgtgggaacgacctctctcaggcctcgcctgggctgtagctattataaaccggcaggagattggtggacctcgctcttataccatcgcagttgcttccctgggtaaaggagtggcctgtaatcctgcctgcttcatcacacagctcctccctgtgaaaaggaagctagggttctatgaatggacttcaaggttaagaagtcacataaatcccacaggcactgttttgcttcagctagaaaatacaatgcagatgtcattaaaagacttactt

SEQ ID NO: 406 - protein, 398 aa, Artificial Sequence
  variant of human alpha-galactosidase A
LDNGLARTPTMGWLHWERFMCNLDCQEEPDSCISEKLFEEMAERMVSEGWKDAGYEYLCIDDCWMAPQRDSEGRLQADPQRFPHGIRQLANHVHSKGLKLGIYADVGNKTCAGFPGSFGYYDIDAQTFADWGVDLLKFDGCYCDSLENLADGYKHMSLALNRTGRSIVYSCEWPLYMWPFQKPNYTEIRQYCNHWRNFADIDDSWKSIKSILDWTSRNQERIVDVAGPGGWNDPDMLVIGNFGLSWNQQVTQMALWAIMAAPLFMSNDLRHISPQAKALLQDKDVIAINQDPLGKQGYQLRQGDNFEVWERPLSGLAWAVAIINRQEIGGPRSYTIAVASLGKGVACNPACFITQLLPVKRKLGFYEWTSRLRSHINPTGTVLLQLENTMQMSLKDLL

SEQ ID NO: 407 - DNA, 1194 bp, Artificial Sequence
  variant of human alpha-galactosidase A
ctggacaatggattggcaaggacgcctaccatgggctggctgcactgggagcgcttcatgtgcaaccttgactgccaggaagagccagattcctgcatcagtgagaagctcttcgaggagatggcagagcggatggtctctgaaggctggaaggatgcaggttatgagtacctctgcattgatgactgttggatggctccccaaagagattcagaaggcagacttcaggcagaccctcagcgctttcctcatgggattcgccagctagctaatcatgttcacagcaaaggactgaagctagggatttatgcagatgttggaaataaaacctgcgcaggcttccctgggagttttggatactacgacattgatgcccagacctttgctgactggggagtagatctgctaaaatttgatggttgttactgtgacagtttggaaaatttggcagatggttataagcacatgtccttggccctgaataggactggcagaagcattgtgtactcctgtgagtggcctctttatatgtggccctttcaaaagcccaattatacagaaatccgacagtactgcaatcactggcgaaattttgctgacattgatgattcctggaaaagtataaagagtatcttggactggacatcttttaaccaggagagaattgttgatgttgctggaccagggggttggaatgacccagatatgttagtgattggcaactttggcctcagctgggaccagcaagtaactcagatggccctctgggctatcatggctgctcctttattcatgtctaatgacctccgagccatcagccctcaagccaaagctctccttcaggataaggacgtaattgccatcaatcaggaccccttgggcaagcaagggtaccagcttagaaagggagacaactttgaagtgtgggaacgacctctctcaggcttagcctgggctgtagctatgataaaccggcaggagattggtggacctcgctcttataccatcgcagttgcttccctgggtaaaggagtggcctgtaatcctgcctgcttcatcacacagctcctccctgtgaaaaggaagctagggttctatgaatggacttcaaggttaagaagtcacataaatcccacaggcactgttttgcttcagctagaaaatacaatgcagatgtcattaaaagacttactt

SEQ ID NO: 408 - protein, 398 aa, Artificial Sequence
  variant of human alpha-galactosidase A
LDNGLARTPTMGWLHWERFMCNLDCQEEPDSCISEKLFEEMAERMVSEGWKDAGYEYLCIDDCWMAPQRDSEGRLQADPQRFPHGIRQLANHVHSKGLKLGIYADVGNKTCAGFPGSFGYYDIDAQTFADWGVDLLKFDGCYCDSLENLADGYKHMSLALNRTGRSIVYSCEWPLYMWPFQKPNYTEIRQYCNHWRNFADIDDSWKSIKSILDWTSFNQERIVDVAGPGGWNDPDMLVIGNFGLSWDQQVTQMALWAIMAAPLFMSNDLRAISPQAKALLQDKDVIAINQDPLGKQGYQLRKGDNFEVWERPLSGLAWAVAMINRQEIGGPRSYTIAVASLGKGVACNPACFITQLLPVKRKLGFYEWTSRLRSHINPTGTVLLQLENTMQMSLKDLL

SEQ ID NO: 409 - DNA, 1251 bp, Artificial Sequence
  variant of human alpha-galactosidase A
atggaatggagctgggtctttctcttcttcctgtcagtaacgactggtgtccactccctggacaatggattggcaaggacgcctacaatgggctggctgcactgggagcgcttcatgtgcaaccttgactgccaggaagagccagattcctgcatcagtgagaagctcttcgaggagatggcagagcggatggtctctgaaggctggaaggatgcaggttatgagtacctctgcattgatgactgttggatggctccccaaagagattcagaaggcagacttcaggcagaccctcagcgctttcctcatgggattcgccagctagctaatcatgttcacagcaaaggactgaagctagggatttatgcagatgttggaaataaaacctgcgcaggcttccctgggagttttggatactacgacattgatgcccagacctttgctgactggggagtagatctgctaaaatttgatggttgttactgtgacagtttggaaaatttggcagatggttataagcacatgtccttggccctgaatatgactggcagaagcattgtgtactcctgtgagtggcctctttatatgtggccctttcaaaagcccaattatacagaaatccgacagtactgcaatcactggcgaaattttgctgacattgatgattcctggaaaagtataaagagtatcttggactggacatctttcaaccaggagagaattgttgatgttgctggaccagggggttggaatgacccagatatgttagtgattggcaactttggcctcagctgggaccagcaagtaactcagatggccctctgggctatcatggctgctcctttattcatgtctaatgacctccgacacatcagccctcaagccaaagctctccttcaggataaggacgtaattgccatcaatcaggaccccttgggcaagcaagggtaccagcttagaaagggagacaactttgaagtgtgggaacgacctctctcaggcgatgcctgggctgtagctattataaaccggcaggagattggtggacctcgctcttataccatcgccgttgcttccctgggtaaaggagtggcctgtaatcctgcctgcttcatcacacagctcctccctgtgaaaaggaagctagggttctatgaatggacttcaaggttaagaagtcacataaatcccacaggcactgttttgcttcagctagaaaatacaatgcagatgtcattaaaagacttactt

SEQ ID NO: 410 - protein, 417 aa, Artificial Sequence
  variant of human alpha-galactosidase A
MEWSWVFLFFLSVTTGVHSLDNGLARTPTMGWLHWERFMCNLDCQEEPDSCISEKLFEEMAERMVSEGWKDAGYEYLCIDDCWMAPQRDSEGRLQADPQRFPHGIRQLANHVHSKGLKLGIYADVGNKTCAGFPGSFGYYDIDAQTFADWGVDLLKFDGCYCDSLENLADGYKHMSLALNMTGRSIVYSCEWPLYMWPFQKPNYTEIRQYCNHWRNFADIDDSWKSIKSILDWTSFNQERIVDVAGPGGWNDPDMLVIGNFGLSWDQQVTQMALWAIMAAPLFMSNDLRHISPQAKALLQDKDVIAINQDPLGKQGYQLRKGDNFEVWERPLSGDAWAVAIINRQEIGGPRSYTIAVASLGKGVACNPACFITQLLPVKRKLGFYEWTSRLRSHINPTGTVLLQLENTMQMSLKDLL

SEQ ID NO: 411 - DNA, 1251 bp, Artificial Sequence
  variant of human alpha-galactosidase A
atggaatggagctgggtctttctcttcttcctgtcagtaacgactggtgtccactccctggacaatggattggcaaggacgcctacaatgggctggctgcactgggagcgcttcatgtgcaaccttgactgccaggaagagccagattcctgcatcagtgagaagctcttcgaggagatggcagagctgatggtctctgaaggctggaaggatgcaggttatgagtacctctgcattgatgactgttggatggctccccaaagagattcagaaggcagacttcaggcagaccctcagcgctttcctcatgggattcgccagctagctaattatgttcacagcaaaggactgaagctagggatttatgcagatgttggaaataaaacctgcgcaggcttccctgggagttttggatactacgacattgatgcccagacctttgctgactggggagtagatctgctaaaatttgatggttgttactgtgacagtttggaaaatttggcagatggttataagcacatgtccttggccctgaataggactggcagaagcattgtgtactcctgtgagtggcctctttatatgtggccctttcaaaagcccaattatacagaaatccgacagtactgcaatcactggcgaaattttgctgacattgatgattcctggaagagtataaagagtatcttggactggacatcttttaaccaggagagaattgttgatgttgctggaccagggggttggaatgacccagatatgttagtgattggcaactttggcctcagctggaaccagcaagtaactcagatggccctctgggctatcatggctgctcctttattcatgtctaatgacctccgacacatcagccctcaagccaaagctctccttcaggataaggacgtaattgccatcaatcaggaccccttgggcaagcaagggtaccagcttagacagggagacaactttgaagtgtgggaacgacctctctcaggcctcgcctgggctgtagctattataaaccggcaggagattggtggacctcgctcttataccatcgcagttgcttccctgggtaaaggagtggcctgtaatcctgcctgcttcatcacacagctcctccctgtgaaaaggaagctagggttctatgaatggacttcaaggttaagaagtcacataaatcccacaggcactgttttgcttcagctagaaaatacaatgcagatgtcattaaaagacttactt

SEQ ID NO: 412 - protein, 417 aa, Artificial Sequence
  variant of human alpha-galactosidase A
MEWSWVFLFFLSVTTGVHSLDNGLARTPTMGWLHWERFMCNLDCQEEPDSCISEKLFEEMAELMVSEGWKDAGYEYLCIDDCWMAPQRDSEGRLQADPQRFPHGIRQLANYVHSKGLKLGIYADVGNKTCAGFPGSFGYYDIDAQTFADWGVDLLKFDGCYCDSLENLADGYKHMSLALNRTGRSIVYSCEWPLYMWPFQKPNYTEIRQYCNHWRNFADIDDSWKSIKSILDWTSFNQERIVDVAGPGGWNDPDMLVIGNFGLSWNQQVTQMALWAIMAAPLFMSNDLRHISPQAKALLQDKDVIAINQDPLGKQGYQLRQGDNFEVWERPLSGLAWAVAIINRQEIGGPRSYTIAVASLGKGVACNPACFITQLLPVKRKLGFYEWTSRLRSHINPTGTVLLQLENTMQMSLKDLL

SEQ ID NO: 413 - DNA, 1194 bp, Artificial Sequence
  variant of human alpha-galactosidase A
ctggacaatggattggcaaggacgcctacaatgggctggctgcactgggagcgcttcatgtgcaaccttgactgccaggaagagccagattcctgcatcagtgagaagctcttcgaggagatggcagagctgatggtctctgaaggctggaaggatgcaggttatgagtacctctgcattgatgactgttggatggctccccaaagagattcagaaggcagacttcaggcagaccctcagcgctttcctcatgggattcgccagctagctaattatgttcacagcaaaggactgaagctagggatttatgcagatgttggaaataaaacctgcgcaggcttccctgggagttttggatactacgacattgatgcccagacctttgctgactggggagtagatctgctaaaatttgatggttgttactgtgacagtttggaaaatttggcagatggttataagcacatgtccttggccctgaataggactggcagaagcattgtgtactcctgtgagtggcctctttatatgtggccctttcaaaagcccaattatacagaaatccgacagtactgcaatcactggcgaaattttgctgacattgatgattcctggaaaagtataaagagtatcttggactggacatcttttaaccaggagagaattgttgatgttgctggaccagggggttggaatgacccagatatgttagtgattggcaactttggcctcagctgggaccagcaagtaactcagatggccctctgggctatcatggctgctcctttattcatgtctaatgacctccgagccatcagccctcaagccaaagctctccttcaggataaggacgtaattgccatcaatcaggaccccttgggcaagcaagggtaccagcttagacagggagacaactttgaagtgtgggaacgacctctctcaggcttagcctgggctgtagctatgataaaccggcaggagattggtggacctcgctcttataccatcgcagttgcttccctgggtaaaggagtggcctgtaatcctgcctgcttcatcacacagctcctccctgtgaaaaggaagctagggttctatgaatggacttcaaggttaagaagtcacataaatcccacaggcactgttttgcttcagctagaaaatacaatgcagatgtcattaaaagacttactt

SEQ ID NO: 414 - protein, 398 aa, Artificial Sequence
  variant of human alpha-galactosidase A
LDNGLARTPTMGWLHWERFMCNLDCQEEPDSCISEKLFEEMAELMVSEGWKDAGYEYLCIDDCWMAPQRDSEGRLQADPQRFPHGIRQLANYVHSKGLKLGIYADVGNKTCAGFPGSFGYYDIDAQTFADWGVDLLKFDGCYCDSLENLADGYKHMSLALNRTGRSIVYSCEWPLYMWPFQKPNYTEIRQYCNHWRNFADIDDSWKSIKSILDWTSFNQERIVDVAGPGGWNDPDMLVIGNFGLSWDQQVTQMALWAIMAAPLFMSNDLRAISPQAKALLQDKDVIAINQDPLGKQGYQLRQGDNFEVWERPLSGLAWAVAMINRQEIGGPRSYTIAVASLGKGVACNPACFITQLLPVKRKLGFYEWTSRLRSHINPTGTVLLQLENTMQMSLKDLL

SEQ ID NO: 415 - DNA, 1194 bp, Artificial Sequence
  variant of human alpha-galactosidase A
ctggacaatggattggcaaggacgcctacaatgggctggctgcactgggagcgcttcatgtgcaaccttgactgccaggaagagccagattcctgcatcagtgagaagctcttcgaggagatggcagagctgatggtctctgaaggctggaaggatgcaggttatgagtacctctgcattgatgactgttggatggctccccaaagagattcagaaggcagacttcaggcagaccctcagcgctttcctcatgggattcgccagctagctaattatgttcacagcaaaggactgaagctagggatttatgcagatgttggaaataaaacctgcgcaggcttccctgggagttttggatactacgacattgatgcccagacctttgctgactggggagtagatctgctaaaatttgatggttgttactgtgacagtttggaaaatttggcagatggttataagcacatgtccttggccctgaataggactggcagaagcattgtgtactcctgtgagtggcctctttatatgtggccctttcaaaagcccaattatacagaaatccgacagtactgcaatcactggcgaaattttgctgacattgatgattcctggaaaagtataaagagtatcttggactggacatcttttaaccaggagagaattgttgatgttgctggaccagggggttggaatgacccagatatgttagtgattggcaactttggcctcagctgggaccagcaagtaactcagatggccctctgggctatcatggctgctcctttattcatgtctaatgacctccgagccatcagccctcaagccaaagctctccttcaggataaggacgtaattgccatcaatcaggaccccttgggcaagcaagggtaccagcttagacagggagacaactttgaagtgtgggaacgacctctttcaggcgatgcctgggctgtagctatgataaaccggcaggagattggtggacctcgctcttataccatcgccgttgcttccctgggtaaaggagtggcctgtaatcctgcctgcttcatcacacagctcctccctgtgaaaaggaagctagggttctatgaatggacttcaaggttaagaagtcacataaatcccacaggcactgttttgcttcagctagaaaatacaatgcagatgtcattaaaagacttactt

SEQ ID NO: 416 - protein, 398 aa, Artificial Sequence
  variant of human alpha-galactosidase A
LDNGLARTPTMGWLHWERFMCNLDCQEEPDSCISEKLFEEMAELMVSEGWKDAGYEYLCIDDCWMAPQRDSEGRLQADPQRFPHGIRQLANYVHSKGLKLGIYADVGNKTCAGFPGSFGYYDIDAQTFADWGVDLLKFDGCYCDSLENLADGYKHMSLALNRTGRSIVYSCEWPLYMWPFQKPNYTEIRQYCNHWRNFADIDDSWKSIKSILDWTSFNQERIVDVAGPGGWNDPDMLVIGNFGLSWDQQVTQMALWAIMAAPLFMSNDLRAISPQAKALLQDKDVIAINQDPLGKQGYQLRQGDNFEVWERPLSGDAWAVAMINRQEIGGPRSYTIAVASLGKGVACNPACFITQLLPVKRKLGFYEWTSRLRSHINPTGTVLLQLENTMQMSLKDLL

SEQ ID NO: 417 - DNA, 1194 bp, Artificial Sequence
  variant of human alpha-galactosidase A
ctggacaatggattggcaaggacgcctacaatgggctggctgcactgggagcgcttcatgtgcaaccttgactgccaggaagagccagattcctgcatcagtgagaagctcttcgaggagatggcagagctgatggtcactgaaggctggaaggatgcaggttatgagtacctctgcattgatgactgttggatggctccccaaagagattcagaaggcagacttcaggcagaccctcagcgctttcctcatgggattcgccagctagctaattatgttcacagcaaaggactgaagctagggatttatgcagatgttggaaataaaacctgcgcaggcttccctgggagttttggatactacgacattgatgcccagacctttgctgactggggagtagatctgctaaaatttgatggttgttactgtgacagtttggaaaatttggcagatggttataagcacatgtccttggccctgaataggactggcagaagcattgtgtactcctgtgagtggcctctttatatgtggccctttcaaaagcccaattatacagaaatccgacagtactgcaatcactggcgaaattttgctgacattgatgattcctggaaaagtataaagagtatcttggactggacatctaggaaccaggagagaattgttgatgttgctggaccagggggttggaatgacccagatatgttagtgattggcaactttggcctcagctgggaccagcaagtaactcagatggccctctgggctatcatggctgctcctttattcatgtctaatgacctccgacacatcagccctcaagccaaagctctccttcaggataaggacgtaattgccatcaatcaggaccccttgggcaagcaagggtaccagcttagacagggagacaactttgaagtgtgggaacgacctctctcaggcttagcctgggctgtagctatgataaaccggcaggagattggtggacctcgctcttataccatcgccgttgcttccctgggtaaaggagtggcctgtaatcctgcctgcttcatcacacagctcctccctgtgaaaaggaagctagggttctatgaagctacttcaaggttaagaagtcacataaatcccacaggcactgttttgcttcagctagaaaatacaatgcagatgtcattaaaagacttactt

SEQ ID NO: 418 - protein, 398 aa, Artificial Sequence
  variant of human alpha-galactosidase A
LDNGLARTPTMGWLHWERFMCNLDCQEEPDSCISEKLFEEMAELMVTEGWKDAGYEYLCIDDCWMAPQRDSEGRLQADPQRFPHGIRQLANYVHSKGLKLGIYADVGNKTCAGFPGSFGYYDIDAQTFADWGVDLLKFDGCYCDSLENLADGYKHMSLALNRTGRSIVYSCEWPLYMWPFQKPNYTEIRQYCNHWRNFADIDDSWKSIKSILDWTSRNQERIVDVAGPGGWNDPDMLVIGNFGLSWDQQVTQMALWAIMAAPLFMSNDLRHISPQAKALLQDKDVIAINQDPLGKQGYQLRQGDNFEVWERPLSGLAWAVAMINRQEIGGPRSYTIAVASLGKGVACNPACFITQLLPVKRKLGFYEATSRLRSHINPTGTVLLQLENTMQMSLKDLL

SEQ ID NO: 419 - DNA, 1251 bp, Artificial Sequence
  variant of human alpha-galactosidase A
atggaatggagctgggtctttctcttcttcctgtcagtaacgactggtgtccactccctggacaatggattggcaaggacgcctacaatgggctggctgcactgggagcgcttcatgtgcaaccttgactgccaggaagagccagattcctgcatcagtgagaagctcttcgaggagatggcagagctgatggtcactgaaggctggaaggatgcaggttatgagtacctctgcattgatgactgttggatggctccccaaagagattcagaaggcagacttcaggcagaccctcagcgctttcctcatgggattcgccagctagctaattatgttcacagcaaaggactgaagctagggatttatgcagatgttggaaataaaacctgcgcaggcttccctgggagttttggatactacgacattgatgcccagacctttgctgactggggagtagatctgctaaaatttgatggttgttactgtgacagtttggaaaatttggcagatggttataagcacatgtccttggccctgaataggactggcagaagcattgtgtactcctgtgagtggcctctttatatgtggccctttcaaaagcccaattatacagaaatccgacagtactgcaatcactggcgaaattttgctgacattgatgattcctggaaaagtataaagagtatcttggactggacatctttcaaccaggagagaattgttgatgttgctggaccagggggttggaatgacccagatatgttagtgattggcaactttggcctcagctgggaccagcaagtaactcagatggccctctgggctatcatggctgctcctttattcatgtctaatgacctccgacacatcagccctcaagccaaagctctccttcaggataaggacgtaattgccatcaatcaggaccccttgggcaagcaagggtaccagcttagacagggagacaactttgaagtgtgggaacgacctctctcaggcctcgcctgggctgtagctatgataaaccggcaggagattggtggacctcgctcttataccatcgcagttgcttccctgggtaaaggagtggcctgtaatcctgcctgcttcatcacacagctcctccctgtgaaaaggaagctagggttctatgaatggacttcaaggttaagaagtcacataaatcccacaggcactgttttgcttcagctagaaaatacaatgcagatgtcattaaaagacttactt

SEQ ID NO: 420 - protein, 417 aa, Artificial Sequence
  variant of human alpha-galactosidase A
MEWSWVFLFFLSVTTGVHSLDNGLARTPTMGWLHWERFMCNLDCQEEPDSCISEKLFEEMAELMVTEGWKDAGYEYLCIDDCWMAPQRDSEGRLQADPQRFPHGIRQLANYVHSKGLKLGIYADVGNKTCAGFPGSFGYYDIDAQTFADWGVDLLKFDGCYCDSLENLADGYKHMSLALNRTGRSIVYSCEWPLYMWPFQKPNYTEIRQYCNHWRNFADIDDSWKSIKSILDWTSFNQERIVDVAGPGGWNDPDMLVIGNFGLSWDQQVTQMALWAIMAAPLFMSNDLRHISPQAKALLQDKDVIAINQDPLGKQGYQLRQGDNFEVWERPLSGLAWAVAMINRQEIGGPRSYTIAVASLGKGVACNPACFITQLLPVKRKLGFYEWTSRLRSHINPTGTVLLQLENTMQMSLKDLL

SEQ ID NO: 421 - DNA, 1194 bp, Artificial Sequence
  variant of human alpha-galactosidase A
ctggacaatggattggcaaggacgcctaccatgggctggctgcactgggagcgcttcatgtgcaaccttgactgccaggaagagccagattcctgcatcagtgagaagctcttcgaggagatggcagagctgatggtcactgaaggctggaaggatgcaggttatgagtacctctgcattgatgactgttggatggctccccaaagagattcagaaggcagacttcaggcagaccctcagcgctttcctcatgggattcgccagctagctaatcatgttcacagcaaaggactgaagctagggatttatgcagatgttggaaataaaacctgcgcaggcttccctgggagttttggatactacgacattgatgcccagacctttgctgactggggagtagatctgctaaaatttgatggttgttactgtgacagtttggaaaatttggcagatggttataagcacatgtccttggccctgaataggactggcagaagcattgtgtactcctgtgagtggcctctttatatgtggccctttcaaaagcccaattatacagaaatccgacagtactgcaatcactggcgaaattttgctgacattgatgattcctggaaaagtataaagagtatcttggactggacatctttcaaccaggagagaattgttgatgttgctggaccagggggttggaatgacccagatatgttagtgattggcaactttggcctcagctgggaccagcaagtaactcagatggccctctgggctatcatggctgctcctttattcatgtctaatgacctccgacacatcagccctcaagccaaagctctccttcaggataaggacgtaattgccatcaatcaggaccccttgggcaagcaagggtaccagcttagaaagggagacaactttgaagtgtgggaacgacctctctcaggcgatgcctgggctgtagctattataaaccggcaggagattggtggacctcgctcttataccatcgcagttgcttccctgggtaaaggagtggcctgtaatcctgcctgcttcatcacacagctcctccctgtgaaaaggaagctagggttctatgaatggacttcaaggttaagaagtcacataaatcccacaggcactgttttgcttcagctagaaaatacaatgcagatgtcattaaaagacttactt

SEQ ID NO: 422 - protein, 398 aa, Artificial Sequence
  variant of human alpha-galactosidase A
LDNGLARTPTMGWLHWERFMCNLDCQEEPDSCISEKLFEEMAELMVTEGWKDAGYEYLCIDDCWMAPQRDSEGRLQADPQRFPHGIRQLANHVHSKGLKLGIYADVGNKTCAGFPGSFGYYDIDAQTFADWGVDLLKFDGCYCDSLENLADGYKHMSLALNRTGRSIVYSCEWPLYMWPFQKPNYTEIRQYCNHWRNFADIDDSWKSIKSILDWTSFNQERIVDVAGPGGWNDPDMLVIGNFGLSWDQQVTQMALWAIMAAPLFMSNDLRHISPQAKALLQDKDVIAINQDPLGKQGYQLRKGDNFEVWERPLSGDAWAVAIINRQEIGGPRSYTIAVASLGKGVACNPACFITQLLPVKRKLGFYEWTSRLRSHINPTGTVLLQLENTMQMSLKDLL

SEQ ID NO: 423 - DNA, 1194 bp, Artificial Sequence
  variant of human alpha-galactosidase A
ctggacaatggattggcaaggacgcctacaatgggctggctgcactgggagcgcttcatgtgcaaccttgactgccaggaagagccagattcctgcatcagtgagaagctcttcgaggagatggcagagctgatggtctctgaaggctggaaggatgcaggttatgagtacctctgcattgatgactgttggatggctccccaaagagattcagaaggcagacttcaggcagaccctcagcgctttcctcatgggattcgccagctagctaatcatgttcacagcaaaggactgaagctagggatttatgcagatgttggaaataaaacctgcgcaggcttccctgggagttttggatactacgacattgatgcccagacctttgctgactggggagtagatctgctaaaatttgatggttgttactgtgacagtttggaaaatttggcagatggttataagcacatgtccttggccctgaataggactggcagaagcattgtgtactcctgtgagtggcctctttatatgtggccctttcaaaagcccaattatacagaaatccgacagtactgcaatcactggcgaaattttgctgacattgatgattcctggaaaagtataaagagtatcttggactggacatctttcaaccaggagagaattgttgatgttgctggaccagggggttggaatgacccagatatgttagtgattggcaactttggcctcagctggaatcagcaagtaactcagatggccctctgggctatcatggctgctcctttattcatgtctaatgacctccgacacatcagccctcaagccaaagctctccttcaggataaggacgtaattgccatcaatcaggaccccttgggcaagcaagggtaccagcttagacagggagacaactttgaagtgtgggaacgacctctctcaggcgatgcctgggctgtagctattataaaccggcaggagattggtggacctcgctcttataccatcgcagttgcttccctgggtaaaggagtggcctgtaatcctgcctgcttcatcacacagctcctccctgtgaaaaggaagctagggttctatgaatggacttcaaggttaagaagtcacataaatcccacaggcactgttttgcttcagctagaaaatacaatgcagatgtcattaaaagacttactt

SEQ ID NO: 424 - protein, 398 aa, Artificial Sequence
  variant of human alpha-galactosidase A
LDNGLARTPTMGWLHWERFMCNLDCQEEPDSCISEKLFEEMAELMVSEGWKDAGYEYLCIDDCWMAPQRDSEGRLQADPQRFPHGIRQLANHVHSKGLKLGIYADVGNKTCAGFPGSFGYYDIDAQTFADWGVDLLKFDGCYCDSLENLADGYKHMSLALNRTGRSIVYSCEWPLYMWPFQKPNYTEIRQYCNHWRNFADIDDSWKSIKSILDWTSFNQERIVDVAGPGGWNDPDMLVIGNFGLSWNQQVTQMALWAIMAAPLFMSNDLRHISPQAKALLQDKDVIAINQDPLGKQGYQLRQGDNFEVWERPLSGDAWAVAIINRQEIGGPRSYTIAVASLGKGVACNPACFITQLLPVKRKLGFYEWTSRLRSHINPTGTVLLQLENTMQMSLKDLL

SEQ ID NO: 425 - DNA, 1194 bp, Artificial Sequence
  variant of human alpha-galactosidase A
ctggacaatggattggcaaggacgcctaccatgggctggctgcactgggagcgcttcatgtgcaaccttgactgccaggaagagccagattcctgcatcagtgagaagctcttcgaggagatggcagagctgatggtctctgaaggctggaaggatgcaggttatgagtacctctgcattgatgactgttggatggctccccaaagagattcagaaggcagacttcaggcagaccctcagcgctttcctcatgggattcgccagctagctaatcatgttcacagcaaaggactgaagctagggatttatgcagatgttggaaataaaacctgcgcaggcttccctgggagttttggatactacgacattgatgcccagacctttgctgactggggagtagatctgctaaaatttgatggttgttactgtgacagtttggaaaatttggcagatggttataagcacatgtccttggccctgaataggactggcagaagcattgtgtactcctgtgagtggcctctttatatgtggccctttcaaaagcccaattatacagaaatccgacagtactgcaatcactggcgaaattttgctgacattgatgattcctggaaaagtataaagagtatcttggactggacatcttttaaccaggagagaattgttgatgttgctggaccagggggttggaatgacccagatatgttagtgattggcaactttggcctcagctgggaccagcaagtaactcagatggccctctgggctatcatggctgctcctttattcatgtctaatgacctccgacacatcagccctcaagccaaagctctccttcaggataaggacgtaattgccatcaatcaggaccccttgggcaagcaagggtaccagcttagaaagggagacaactttgaagtgtgggaacgacctctctcaggcgatgcctgggctgtagctatgataaaccggcaggagattggtggacctcgctcttataccatccccgttgcttccctgggtaaaggagtggcctgtaatcctgcctgcttcatcacacagctcctccctgtgaaaaggaagctagggttctatgaagctacttcaaggttaagaagtcacataaatcccacaggcactgttttgcttcagctagaaaatacaatgcagatgtcattaaaagacttactt

SEQ ID NO: 426 - protein, 398 aa, Artificial Sequence
  variant of human alpha-galactosidase A
LDNGLARTPTMGWLHWERFMCNLDCQEEPDSCISEKLFEEMAELMVSEGWKDAGYEYLCIDDCWMAPQRDSEGRLQADPQRFPHGIRQLANHVHSKGLKLGIYADVGNKTCAGFPGSFGYYDIDAQTFADWGVDLLKFDGCYCDSLENLADGYKHMSLALNRTGRSIVYSCEWPLYMWPFQKPNYTEIRQYCNHWRNFADIDDSWKSIKSILDWTSFNQERIVDVAGPGGWNDPDMLVIGNFGLSWDQQVTQMALWAIMAAPLFMSNDLRHISPQAKALLQDKDVIAINQDPLGKQGYQLRKGDNFEVWERPLSGDAWAVAMINRQEIGGPRSYTIPVASLGKGVACNPACFITQLLPVKRKLGFYEATSRLRSHINPTGTVLLQLENTMQMSLKDLL

SEQ ID NO: 427 - DNA, 1194 bp, Artificial Sequence
  variant of human alpha-galactosidase A
ctggacaatggattggcaaggacgcctacaatgggctggctgcactgggagcgcttcatgtgcaaccttgactgccaggaagagccagattcctgcatcagtgagaagctcttcatggagatggcagagctcatggtctcagaaggctggaaggatgcaggttatgagtacctctgcattgatgactgttggatggctccccaaagagattcagaaggcagacttcaggcagaccctcagcgctttcctcatgggattcgccagctagctaattatgttcacagcaaaggactgaagctagggatttatgcagatgttggaaataaaacctgcgcaggcttccctgggagttttggatactacgacattgatgcccagacctttgctgactggggagtagatctgctaaaatttgatggttgttactgtgacagtttggaaaatttggcagatggttataagcacatgtccttggccctgaataggactggcagaagcattgtgtactcctgtgagtggcctctttatatgtggccctttcaaaagcccaattatacagaaatccgacagtactgcaatcactggcgaaattttgctgacattgatgattcctggaaaagtataaagagtatcttggactggacatcttttaaccaggagagaattgttgatgttgctggaccagggggttggaatgacccagatatgttagtgattggcaactttggcctcagctgggaccagcaagtaactcagatggccctctgggctatcatggctgctcctttattcatgtctaatgacctccgacacatcagccctcaagccaaagctctccttcaggataaggacgtaattgccatcaatcaggaccccttgggcaagcaagggtaccagcttagacagggagacaactttgaagtgtgggaacgacctctctcaggcttagcctgggctgtagctatgataaaccggcaggagattggtggacctcgctcttataccatcgcagttgcttccctgggtaaaggagtggcctgtaatcctgcctgcttcatcacacagctcctccctgtgaaaaggaagctagggttctatgaatggacttcaaggttaagaagtcacataaatcccacaggcactgttttgcttcagctagaaaatacaatgcagatgtcattaaaagacttactt

SEQ ID NO: 428 - protein, 398 aa, Artificial Sequence
  variant of human alpha-galactosidase A
LDNGLARTPTMGWLHWERFMCNLDCQEEPDSCISEKLFMEMAELMVSEGWKDAGYEYLCIDDCWMAPQRDSEGRLQADPQRFPHGIRQLANYVHSKGLKLGIYADVGNKTCAGFPGSFGYYDIDAQTFADWGVDLLKFDGCYCDSLENLADGYKHMSLALNRTGRSIVYSCEWPLYMWPFQKPNYTEIRQYCNHWRNFADIDDSWKSIKSILDWTSFNQERIVDVAGPGGWNDPDMLVIGNFGLSWDQQVTQMALWAIMAAPLFMSNDLRHISPQAKALLQDKDVIAINQDPLGKQGYQLRQGDNFEVWERPLSGLAWAVAMINRQEIGGPRSYTIAVASLGKGVACNPACFITQLLPVKRKLGFYEWTSRLRSHINPTGTVLLQLENTMQMSLKDLL

SEQ ID NO: 429 - DNA, 1194 bp, Artificial Sequence
  variant of human alpha-galactosidase A
ctggataatggattggctagaacacctcctatggggtggcttcactgggagaggttcatgtgcaacctggactgtcaggaagaaccagacagctgcatctccgagaagctctttgaagaaatggccgaactgatggtgaccgagggctggaaagatgcaggttacgagtatctgtgtattgacgattgctggatggccccacaacgggattctgagggaagacttcaggctgatccgcagcgcttccctcatggcataaggcagctggcaaaccacgtccacagtaaggggctcaaattgggaatctacgcggacgtgggcaataagacctgtgccggttttccgggatcattcgggtattatgacattgacgcccaaacgtttgctgattggggcgttgacctgctgaaattcgatggttgctactgtgacagcctcgaaaacctggcagacggctacaagcatatgtctctcgccctgaatagaaccggtcggccaatcgtatattcctgcgagtggcctctttacatgtggccatttcagaaaccgaactacacagaaattcgccagtattgcaatcattggaggaacttcgctgatatcgatgactcatgggcctccataaagagcatcttggactggaccagtcggaatcaggagcgaattgtggatgtcgcaggccctggaggatggaacgatccagacatgctggtgatcggcaattttggcctctcttgggaccagcaggttacccaaatggctctgtgggcaattatggccggtcctcttttcatgagcaacgatctgcgcgcgatctcaccacaggcaaaggccctgctccaagacaaagatgtgatagccatcaatcaggacccgttgggaaagcagggctaccagctgagaaaaggcgacaactttgaggtctgggaaaggcctttgagtggagatgcgtgggctgtggccattattaatcggcaagagatcggaggtccacgctcctatacaattgctgtagcatctcttggcaagggcgttgcctgtaacccagcttgcttcatcactcagcttctgccggtgaagagaaaactgggtttctacgaagcaaccagcaggctccgatcccacatcaaccctacaggaaccgtcctcttgcagctggagaatacgatgcagacttcactgaaggacctcctg

SEQ ID NO: 430 - protein, 398 aa, Artificial Sequence
  variant of human alpha-galactosidase A
LDNGLARTPPMGWLHWERFMCNLDCQEEPDSCISEKLFEEMAELMVTEGWKDAGYEYLCIDDCWMAPQRDSEGRLQADPQRFPHGIRQLANHVHSKGLKLGIYADVGNKTCAGFPGSFGYYDIDAQTFADWGVDLLKFDGCYCDSLENLADGYKHMSLALNRTGRPIVYSCEWPLYMWPFQKPNYTEIRQYCNHWRNFADIDDSWASIKSILDWTSRNQERIVDVAGPGGWNDPDMLVIGNFGLSWDQQVTQMALWAIMAGPLFMSNDLRAISPQAKALLQDKDVIAINQDPLGKQGYQLRKGDNFEVWERPLSGDAWAVAIINRQEIGGPRSYTIAVASLGKGVACNPACFITQLLPVKRKLGFYEATSRLRSHINPTGTVLLQLENTMQTSLKDLL

SEQ ID NO: 431 - DNA, 1194 bp, Artificial Sequence
  variant of human alpha-galactosidase A
ctggataatggattggctagaacacctcccatggggtggcttcactgggagaggttcatgtgcaacctggactgtcaggaagaaccagacagctgcatctccgagaagctctttgaagaaatggccgaactgatggtgtccgagggctggaaagatgcaggttacgagtatctgtgtattgacgattgctggatggccccacaacgggattctgagggaagacttcaggctgatccgcagcgcttccctcatggcataaggcagctggcaaactacgtccacagtaaggggctcaaattgggaatctacgcggacgtgggcaataagacctgtgccggttttccgggatcattcgggtattatgacattgacgcccaaacgtttgctgattggggcgttgacctgctgaaattcgatggttgctactgtgacagcctcgaaaacctggcagacggctacaagcatatgtctctcgccctgaatagaaccggtcggccaatcgtatattcctgcgagtggcctctttacatgtggccatttcagaaaccgaactacacagaaattcgccagtattgcaatcattggaggaacttcgctgatatcgatgactcatgggcctccataaagagcatcttggactggaccagttttaatcaggagcgaattgtggatgtcgcaggccctggaggatggaacgatccagacatgctggtgatcggcaattttggcctctcttgggaccagcaggttacccaaatggctctgtgggcaattatggccggccctcttttcatgagcaacgatctgcgcgctatctcaccacaggcaaaggccctgctccaagacaaagatgtgatagccatcaatcaggacccgttgggaaagcagggctaccagctgagaaagggcgacaactttgaggtctgggaaaggcctttgagtggactcgcgtgggctgtggccatgattaatcggcaagagatcggaggtccacgctcctatacaattcctgtagcatctcttggcaagggcgttgcctgtaacccagcttgcttcatcactcagcttctgccggtgaagagaaaactgggtttctacgaagcaaccagcaggctccgatcccacatcaaccctacaggaaccgtcctcttgcagctggagaatacgatgcagatgtcactgaaggacctcctg

SEQ ID NO: 432 - protein, 398 aa, Artificial Sequence
  variant of human alpha-galactosidase A
LDNGLARTPPMGWLHWERFMCNLDCQEEPDSCISEKLFEEMAELMVSEGWKDAGYEYLCIDDCWMAPQRDSEGRLQADPQRFPHGIRQLANYVHSKGLKLGIYADVGNKTCAGFPGSFGYYDIDAQTFADWGVDLLKFDGCYCDSLENLADGYKHMSLALNRTGRPIVYSCEWPLYMWPFQKPNYTEIRQYCNHWRNFADIDDSWASIKSILDWTSFNQERIVDVAGPGGWNDPDMLVIGNFGLSWDQQVTQMALWAIMAGPLFMSNDLRAISPQAKALLQDKDVIAINQDPLGKQGYQLRKGDNFEVWERPLSGLAWAVAMINRQEIGGPRSYTIPVASLGKGVACNPACFITQLLPVKRKLGFYEATSRLRSHINPTGTVLLQLENTMQMSLKDLL

SEQ ID NO: 433 - DNA, 1194 bp, Artificial Sequence
  variant of human alpha-galactosidase A
ctggacaatggattggcaaggacgcctacaatgggctggctgcactgggagcgcttcatgtgcaaccttgactgccaggaagagccagattcctgcatcagtgagaagctcttcatggagatggcagagctcatggtctcagaaggctggaaggatgcaggttatgagtacctctgcattgatgactgttggatggctccccaaagagattcagaaggcagacttcaggcagaccctcagcgctttcctcatgggattcgccagctagctaattatgttcacagcaaaggactgaagctagggatttatgcagatgttggaaataaaacctgcgcaggcttccctgggagttttggatactacgacattgatgcccagacctttgctgactggggagtagatctgctaaaatttgatggttgttactgtgacagtttggaaaatttggcagatggttataagcacatgtccttggccctgaataggactggcagaagcattgtgtactcctgtgagtggcctctttatatgtggccctttcaaaagcccaattatacagaaatccgacagtactgcaatcactggcgaaattttgctgacattgatgattcctggaaaagtataaagagtatcttggactggacatcttttaaccaggagagaattgttgatgttgctggaccagggggttggaatgacccagatatgttagtgattggcaactttggcctcagctgggaccagcaagtaactcagatggccctctgggctatcatggctgctcctttattcatgtctaatgacctccgagccatcagccctcaagccaaagctctccttcaggataaggacgtaattgccatcaatcaggaccccttgggcaagcaagggtaccagcttagacagggagacaactttgaagtgtgggaacgacctctctcaggcttagcctgggctgtagctatgataaaccggcaggagattggtggacctcgctcttataccatcgccgttgcttccctgggtaaaggagtggcctgtaatcctgcctgcttcatcacacagctcctccctgtgaaaaggaagctagggttctatgaatggacttcaaggttaagaagtcacataaatcccacaggcactgttttgcttcagctagaaaatacaatgcagatgtcattaaaagacttactt

SEQ ID NO: 434 - protein, 398 aa, Artificial Sequence
  variant of human alpha-galactosidase A
LDNGLARTPTMGWLHWERFMCNLDCQEEPDSCISEKLFMEMAELMVSEGWKDAGYEYLCIDDCWMAPQRDSEGRLQADPQRFPHGIRQLANYVHSKGLKLGIYADVGNKTCAGFPGSFGYYDIDAQTFADWGVDLLKFDGCYCDSLENLADGYKHMSLALNRTGRSIVYSCEWPLYMWPFQKPNYTEIRQYCNHWRNFADIDDSWKSIKSILDWTSFNQERIVDVAGPGGWNDPDMLVIGNFGLSWDQQVTQMALWAIMAAPLFMSNDLRAISPQAKALLQDKDVIAINQDPLGKQGYQLRQGDNFEVWERPLSGLAWAVAMINRQEIGGPRSYTIAVASLGKGVACNPACFITQLLPVKRKLGFYEWTSRLRSHINPTGTVLLQLENTMQMSLKDLL

SEQ ID NO: 435 - DNA, 1194 bp, Artificial Sequence
  variant of human alpha-galactosidase A
ctggacaatggattggcaaggacgcctacaatgggctggctgcactgggagcgcttcatgtgcaaccttgactgccaggaagagccagattcctgcatcagtgagaagctcttcatggagatggcagagctcatggtctcagaaggctggaaggatgcaggttatgagtacctctgcattgatgactgttggatggctccccaaagagattcagaaggcagacttcaggcagaccctcagcgctttcctcatgggattcgccagctagctaattatgttcacagcaaaggactgaagctagggatttatgcagatgttggaaataaaacctgcgcaggcttccctgggagttttggatactacgacattgatgcccagacctttgctgactggggagtagatctgctaaaatttgatggttgttactgtgacagtttggaaaatttggcagatggttataagcacatgtccttggccctgaataggactggcagaagcattgtgtactcctgtgagtggcctctttatatgtggccctttcaaaagcccaattatacagaaatccgacagtactgcaatcactggcgaaattttgctgacattgatgattcctggaaaagtataaagagtatcttggactggacatctttcaaccaggagagaattgttgatgttgctggaccagggggttggaatgacccagatatgttagtgattggcaactttggcctcagctgggaccagcaagtaactcagatggccctctgggctatcatggctgctcctttattcatgtctaatgacctccgacacatcagccctcaagccaaagctctccttcaggataaggacgtaattgccatcaatcaggaccccttgggcaagcaagggtaccagcttagaaagggagacaactttgaagtgtgggaacgacctctctcaggcctcgcctgggctgtagctatgataaaccggcaggagattggtggacctcgctcttataccatcgccgttgcttccctgggtaaaggagtggcctgtaatcctgcctgcttcatcacacagctcctccctgtgaaaaggaagctagggttctatgaatggacttcaaggttaagaagtcacataaatcccacaggcactgttttgcttcagctagaaaatacaatgcagatgtcattaaaagacttactt

SEQ ID NO: 436 - protein, 398 aa, Artificial Sequence
  variant of human alpha-galactosidase A
LDNGLARTPTMGWLHWERFMCNLDCQEEPDSCISEKLFMEMAELMVSEGWKDAGYEYLCIDDCWMAPQRDSEGRLQADPQRFPHGIRQLANYVHSKGLKLGIYADVGNKTCAGFPGSFGYYDIDAQTFADWGVDLLKFDGCYCDSLENLADGYKHMSLALNRTGRSIVYSCEWPLYMWPFQKPNYTEIRQYCNHWRNFADIDDSWKSIKSILDWTSFNQERIVDVAGPGGWNDPDMLVIGNFGLSWDQQVTQMALWAIMAAPLFMSNDLRHISPQAKALLQDKDVIAINQDPLGKQGYQLRKGDNFEVWERPLSGLAWAVAMINRQEIGGPRSYTIAVASLGKGVACNPACFITQLLPVKRKLGFYEWTSRLRSHINPTGTVLLQLENTMQMSLKDLL

SEQ ID NO: 437 - DNA, 1251 bp, Artificial Sequence
  variant of human alpha-galactosidase A
atggaatggagctgggtctttctcttcttcctgtcagtaacgactggtgtccactccctggacaatggattggcaaggacgcctacaatgggctggctgcactgggagcgcttcatgtgcaaccttgactgccaggaagagccagattcctgcatcagtgagaagctcttcatggagatggcagagctgatggtctctgaaggctggaaggatgcaggttatgagtacctctgcattgatgactgttggatggctccccaaagagattcagaaggcagacttcaggcagaccctcagcgctttcctcatgggattcgccagctagctaattatgttcacagcaaaggactgaagctagggatttatgcagatgttggaaataaaacctgcgcaggcttccctgggagttttggatactacgacattgatgcccagacctttgctgactggggagtagatctgctaaaatttgatggttgttactgtgacagtttggaaaatttggcagatggttataagcacatgtccttggccctgaataggactggcagaagcattgtgtactcctgtgagtggcctctttatatgtggccctttcaaaagcccaattatacagaaatccgacagtactgcaatcactggcgaaattttgctgacattgatgattcctggaaaagtataaagagtatcttggactggacatctttcaaccaggagagaattgttgatgttgctggaccagggggttggaatgacccagatatgttagtgattggcaactttggcctcagctggaaccagcaagtaactcagatggccctctgggctatcatggctgctcctttattcatgtctaatgacctccgacacatcagccctcaagccaaagctctccttcaggataaggacgtaattgccatcaatcaggaccccttgggcaagcaagggtaccagcttagaaagggagacaactttgaagtgtgggaacgacctctctcaggcttagcctgggctgtagctattataaaccggcaggagattggtggacctcgctcttataccatcgcagttgcttccctgggtaaaggagtggcctgtaatcctgcctgcttcatcacacagctcctccctgtgaaaaggaagctagggttctatgaagctacttcaaggttaagaagtcacataaatcccacaggcactgttttgcttcagctagaaaatacaatgcagatgtcattaaaagacttactt

SEQ ID NO: 438 - protein, 417 aa, Artificial Sequence
  variant of human alpha-galactosidase A
MEWSWVFLFFLSVTTGVHSLDNGLARTPTMGWLHWERFMCNLDCQEEPDSCISEKLFMEMAELMVSEGWKDAGYEYLCIDDCWMAPQRDSEGRLQADPQRFPHGIRQLANYVHSKGLKLGIYADVGNKTCAGFPGSFGYYDIDAQTFADWGVDLLKFDGCYCDSLENLADGYKHMSLALNRTGRSIVYSCEWPLYMWPFQKPNYTEIRQYCNHWRNFADIDDSWKSIKSILDWTSFNQERIVDVAGPGGWNDPDMLVIGNFGLSWNQQVTQMALWAIMAAPLFMSNDLRHISPQAKALLQDKDVIAINQDPLGKQGYQLRKGDNFEVWERPLSGLAWAVAIINRQEIGGPRSYTIAVASLGKGVACNPACFITQLLPVKRKLGFYEATSRLRSHINPTGTVLLQLENTMQMSLKDLL

SEQ ID NO: 439 - DNA, 1251 bp, Artificial Sequence
  variant of human alpha-galactosidase A
atggaatggagctgggtctttctcttcttcctgtcagtaacgactggtgtccactccctggacaatggattggcaaggacgcctacaatgggctggctgcactgggagcgcttcatgtgcaaccttgactgccaggaagagccagattcctgcatcagtgagaagctcttcatggagatggcagagctgatggtcactgaaggctggaaggatgcaggttatgagtacctctgcattgatgactgttggatggctccccaaagagattcagaaggcagacttcaggcagaccctcagcgctttcctcatgggattcgccagctagctaattatgttcacagcaaaggactgaagctagggatttatgcagatgttggaaataaaacctgcgcaggcttccctgggagttttggatactacgacattgatgcccagacctttgctgactggggagtagatctgctaaaatttgatggttgttactgtgacagtttggaaaatttggcagatggttataagcacatgtccttggccctgaataggactggcagaagcattgtgtactcctgtgagtggcctctttatatgtggccctttcaaaagcccaattatacagaaatccgacagtactgcaatcactggcgaaattttgctgacattgatgattcctggaaaagtataaagagtatcttggactggacatctaggaaccaggagagaattgttgatgttgctggaccagggggttggaatgacccagatatgttagtgattggcaactttggcctcagctggaatcagcaagtaactcagatggccctctgggctatcatggctgctcctttattcatgtctaatgacctccgacacatcagccctcaagccaaagctctccttcaggataaggacgtaattgccatcaatcaggaccccttgggcaagcaagggtaccagcttagaaagggagacaactttgaagtgtgggaacgacctctctcaggcttagcctgggctgtagctatgataaaccggcaggagattggtggacctcgctcttataccatcgcagttgcttccctgggtaaaggagtggcctgtaatcctgcctgcttcatcacacagctcctccctgtgaaaaggaagctagggttctatgaatggacttcaaggttaagaagtcacataaatcccacaggcactgttttgcttcagctagaaaatacaatgcagatgtcattaaaagacttactt

SEQ ID NO: 440 - protein, 417 aa, Artificial Sequence
  variant of human alpha-galactosidase A
MEWSWVFLFFLSVTTGVHSLDNGLARTPTMGWLHWERFMCNLDCQEEPDSCISEKLFMEMAELMVTEGWKDAGYEYLCIDDCWMAPQRDSEGRLQADPQRFPHGIRQLANYVHSKGLKLGIYADVGNKTCAGFPGSFGYYDIDAQTFADWGVDLLKFDGCYCDSLENLADGYKHMSLALNRTGRSIVYSCEWPLYMWPFQKPNYTEIRQYCNHWRNFADIDDSWKSIKSILDWTSRNQERIVDVAGPGGWNDPDMLVIGNFGLSWNQQVTQMALWAIMAAPLFMSNDLRHISPQAKALLQDKDVIAINQDPLGKQGYQLRKGDNFEVWERPLSGLAWAVAMINRQEIGGPRSYTIAVASLGKGVACNPACFITQLLPVKRKLGFYEWTSRLRSHINPTGTVLLQLENTMQMSLKDLL

SEQ ID NO: 441 - DNA, 1194 bp, Artificial Sequence
  variant of human alpha-galactosidase A
ctggacaatggattggcaaggacgcctacaatgggctggctgcactgggagcgcttcatgtgcaaccttgactgccaggaagagccagattcctgcatcagtgagaagctcttcatggagatggcagagctgatggtcactgaaggctggaaggatgcaggttatgagtacctctgcattgatgactgttggatggctccccaaagagattcagaaggcagacttcaggcagaccctcagcgctttcctcatgggattcgccagctagctaattatgttcacagcaaaggactgaagctagggatttatgcagatgttggaaataaaacctgcgcaggcttccctgggagttttggatactacgacattgatgcccagacctttgctgactggggagtagatctgctaaaatttgatggttgttactgtgacagtttggaaaatttggcagatggttataagcacatgtccttggccctgaataggactggcagaagcattgtgtactcctgtgagtggcctctttatatgtggccctttcaaaagcccaattatacagaaatccgacagtactgcaatcactggcgaaattttgctgacattgatgattcctggaaaagtataaagagtatcttggactggacatctttcaaccaggagagaattgttgatgttgctggaccagggggttggaatgacccagatatgttagtgattggcaactttggcctcagctgggaccagcaagtaactcagatggccctctgggctatcatggctgctcctttattcatgtctaatgacctccgacacatcagccctcaagccaaagctctccttcaggataaggacgtaattgccatcaatcaggaccccttgggcaagcaagggtaccagcttagacagggagacaactttgaagtgtgggaacgacctctctcaggcttagcctgggctgtagctatgataaaccggcaggagattggtggacctcgctcttataccatcgcagttgcttccctgggtaaaggagtggcctgtaatcctgcctgcttcatcacacagctcctccctgtgaaaaggaagctagggttctatgaatggacttcaaggttaagaagtcacataaatcccacaggcactgttttgcttcagctagaaaatacaatgcagatgtcattaaaagacttactt

SEQ ID NO: 442 - protein, 398 aa, Artificial Sequence
  variant of human alpha-galactosidase A
LDNGLARTPTMGWLHWERFMCNLDCQEEPDSCISEKLFMEMAELMVTEGWKDAGYEYLCIDDCWMAPQRDSEGRLQADPQRFPHGIRQLANYVHSKGLKLGIYADVGNKTCAGFPGSFGYYDIDAQTFADWGVDLLKFDGCYCDSLENLADGYKHMSLALNRTGRSIVYSCEWPLYMWPFQKPNYTEIRQYCNHWRNFADIDDSWKSIKSILDWTSFNQERIVDVAGPGGWNDPDMLVIGNFGLSWDQQVTQMALWAIMAAPLFMSNDLRHISPQAKALLQDKDVIAINQDPLGKQGYQLRQGDNFEVWERPLSGLAWAVAMINRQEIGGPRSYTIAVASLGKGVACNPACFITQLLPVKRKLGFYEWTSRLRSHINPTGTVLLQLENTMQMSLKDLL

SEQ ID NO: 443 - DNA, 1251 bp, Artificial Sequence
  variant of human alpha-galactosidase A
atggaatggagctgggtctttctcttcttcctgtcagtaacgactggtgtccactccctggacaatggattggcaaggacgcctacaatgggctggctgcactgggagcgcttcatgtgcaaccttgactgccaggaagagccagattcctgcatcagtgagaagctcttcatggagatggcagagctgatggtcactgaaggctggaaggatgcaggttatgagtacctctgcattgatgactgttggatggctccccaaagagattcagaaggcagacttcaggcagaccctcagcgctttcctcatgggattcgccagctagctaattatgttcacagcaaaggactgaagctagggatttatgcagatgttggaaataaaacctgcgcaggcttccctgggagttttggatactacgacattgatgcccagacctttgctgactggggagtagatctgctaaaatttgatggttgttactgtgacagtttggaaaatttggcagatggttataagcacatgtccttggccctgaataggactggcagaagcattgtgtactcctgtgagtggcctctttatatgtggccctttcaaaagcccaattatacagaaatccgacagtactgcaatcactggcgaaattttgctgacattgatgattcctggaaaagtataaagagtatcttggactggacatctttcaaccaggagagaattgttgatgttgctggaccagggggttggaatgacccagatatgttagtgattggcaactttggcctcagctgggaccagcaagtaactcagatggccctctgggctatcatggctgctcctttattcatgtctaatgacctccgagccatcagccctcaagccaaagctctccttcaggataaggacgtaattgccatcaatcaggaccccttgggcaagcaagggtaccagcttagacagggagacaactttgaagtgtgggaacgacctctctcaggcttagcctgggctgtagctatgataaaccggcaggagattggtggacctcgctcttataccatcgcagttgcttccctgggtaaaggagtggcctgtaatcctgcctgcttcatcacacagctcctccctgtgaaaaggaagctagggttctatgaatggacttcaaggttaagaagtcacataaatcccacaggcactgttttgcttcagctagaaaatacaatgcagatgtcattaaaagacttactt

SEQ ID NO: 444 - protein, 417 aa, Artificial Sequence
  variant of human alpha-galactosidase A
MEWSWVFLFFLSVTTGVHSLDNGLARTPTMGWLHWERFMCNLDCQEEPDSCISEKLFMEMAELMVTEGWKDAGYEYLCIDDCWMAPQRDSEGRLQADPQRFPHGIRQLANYVHSKGLKLGIYADVGNKTCAGFPGSFGYYDIDAQTFADWGVDLLKFDGCYCDSLENLADGYKHMSLALNRTGRSIVYSCEWPLYMWPFQKPNYTEIRQYCNHWRNFADIDDSWKSIKSILDWTSFNQERIVDVAGPGGWNDPDMLVIGNFGLSWDQQVTQMALWAIMAAPLFMSNDLRAISPQAKALLQDKDVIAINQDPLGKQGYQLRQGDNFEVWERPLSGLAWAVAMINRQEIGGPRSYTIAVASLGKGVACNPACFITQLLPVKRKLGFYEWTSRLRSHINPTGTVLLQLENTMQMSLKDLL

SEQ ID NO: 445 - DNA, 1194 bp, Artificial Sequence
  variant of human alpha-galactosidase A
ctggacaatggattggcaaggacgcctaccatgggctggctgcactgggagcgcttcatgtgcaaccttgactgccaggaagagccagattcctgcatcagtgagaagctcttcatggagatggcagagctgatggtcactgaaggctggaaggatgcaggttatgagtacctctgcattgatgactgttggatggctccccaaagagattcagaaggcagacttcaggcagaccctcagcgctttcctcatgggattcgccagctagctaatcatgttcacagcaaaggactgaagctagggatttatgcagatgttggaaataaaacctgcgcaggcttccctgggagttttggatactacgacattgatgcccagacctttgctgactggggagtagatctgctaaaatttgatggttgttactgtgacagtttggaaaatttggcagatggttataagcacatgtccttggccctgaataggactggcagaagcattgtgtactcctgtgagtggcctctttatatgtggccctttcaaaagcccaattatacagaaatccgacagtactgcaatcactggcgaaattttgctgacattgatgattcctggaaaagtataaagagtatcttggactggacatctttcaaccaggagagaattgttgatgttgctggaccagggggttggaatgacccagatatgttagtgattggcaactttggcctcagctgggaccagcaagtaactcagatggccctctgggctatcatggctgctcctttattcatgtctaatgacctccgagccatcagccctcaagccaaagctctccttcaggataaggacgtaattgccatcaatcaggaccccttgggcaagcaagggtaccagcttagacagggagacaactttgaagtgtgggaacgacctctctcaggcttagcctgggctgtagctatgataaaccggcaggagattggtggacctcgctcttataccatcgccgttgcttccctgggtaaaggagtggcctgtaatcctgcctgcttcatcacacagctcctccctgtgaaaaggaagctagggttctatgaatggacttcaaggttaagaagtcacataaatcccacaggcactgttttgcttcagctagaaaatacaatgcagatgtcattaaaagacttactt

SEQ ID NO: 446 - protein, 398 aa, Artificial Sequence
  variant of human alpha-galactosidase A
LDNGLARTPTMGWLHWERFMCNLDCQEEPDSCISEKLFMEMAELMVTEGWKDAGYEYLCIDDCWMAPQRDSEGRLQADPQRFPHGIRQLANHVHSKGLKLGIYADVGNKTCAGFPGSFGYYDIDAQTFADWGVDLLKFDGCYCDSLENLADGYKHMSLALNRTGRSIVYSCEWPLYMWPFQKPNYTEIRQYCNHWRNFADIDDSWKSIKSILDWTSFNQERIVDVAGPGGWNDPDMLVIGNFGLSWDQQVTQMALWAIMAAPLFMSNDLRAISPQAKALLQDKDVIAINQDPLGKQGYQLRQGDNFEVWERPLSGLAWAVAMINRQEIGGPRSYTIAVASLGKGVACNPACFITQLLPVKRKLGFYEWTSRLRSHINPTGTVLLQLENTMQMSLKDLL

SEQ ID NO: 447 - DNA, 1194 bp, Artificial Sequence
  variant of human alpha-galactosidase A
ctggacaatggattggcaaggacgcctccaatgggctggctgcactgggagcgcttcatgtgcaaccttgactgccaggaagagccagattcctgcatcagtgagaagctcttcatggagatggcagagctcatggtctcagaaggctggaaggatgcaggttatgagtacctctgcattgatgactgttggatggctccccaaagagattcagaaggcagacttcaggcagaccctcagcgctttcctcatgggattcgccagctagctaattatgttcacagcaaaggactgaagctagggatttatgcagatgttggaaataaaacctgcgcaggcttccctgggagttttggatactacgacattgatgcccagacctttgctgactggggagtagatctgctaaaatttgatggttgttactgtgacagtttggaaaatttggcagatggttataagcacatgtccttggccctgaataggactggcagaagcattgtgtactcctgtgagtggcctctttatatgtggccctttcaaaagcccaattatacagaaatccgacagtactgcaatcactggcgaaattttgctgacattgatgattcctggaaaagtataaagagtatcttggactggacatcttttaaccaggagagaattgttgatgttgctggaccagggggttggaatgacccagatatgttagtgattggcaactttggcctcagctggaaccagcaagtaactcagatggccctctgggctatcatggctgctcctttattcatgtctaatgacctccgacacatcagccctcaagccaaagctctccttcaggataaggacgtaattgccatcaatcaggaccccttgggcaagcaagggtaccagcttagacagggagacaactttgaagtgtgggaacgacctctctcaggcttagcctgggctgtagctatgataaaccggcaggagattggtggacctcgctcttataccatcgcagttgcttccctgggtaaaggagtggcctgtaatcctgcctgcttcatcacacagctcctccctgtgaaaaggaagctagggttctatgaatggacttcaaggttaagaagtcacataaatcccacaggcactgttttgcttcagctagaaaatacaatgcagatgtcattaaaagacttactt

SEQ ID NO: 448 - protein, 398 aa, Artificial Sequence
  variant of human alpha-galactosidase A
LDNGLARTPPMGWLHWERFMCNLDCQEEPDSCISEKLFMEMAELMVSEGWKDAGYEYLCIDDCWMAPQRDSEGRLQADPQRFPHGIRQLANYVHSKGLKLGIYADVGNKTCAGFPGSFGYYDIDAQTFADWGVDLLKFDGCYCDSLENLADGYKHMSLALNRTGRSIVYSCEWPLYMWPFQKPNYTEIRQYCNHWRNFADIDDSWKSIKSILDWTSFNQERIVDVAGPGGWNDPDMLVIGNFGLSWNQQVTQMALWAIMAAPLFMSNDLRHISPQAKALLQDKDVIAINQDPLGKQGYQLRQGDNFEVWERPLSGLAWAVAMINRQEIGGPRSYTIAVASLGKGVACNPACFITQLLPVKRKLGFYEWTSRLRSHINPTGTVLLQLENTMQMSLKDLL

SEQ ID NO: 449 - DNA, 1194 bp, Artificial Sequence
  variant of human alpha-galactosidase A
ctggacaatggattggcaaggacgcctccaatgggctggctgcactgggagcgcttcatgtgcaaccttgactgccaggaagagccagattcctgcatcagtgagaagctcttcatggagatggcagagctcatggtctcagaaggctggaaggatgcaggttatgagtacctctgcattgatgactgttggatggctccccaaagagattcagaaggcagacttcaggcagaccctcagcgctttcctcatgggattcgccagctagctaattatgttcacagcaaaggactgaagctagggatttatgcagatgttggaaataaaacctgcgcaggcttccctgggagttttggatactacgacattgatgcccagacctttgctgactggggagtagatctgctaaaatttgatggttgttactgtgacagtttggaaaatttggcagatggttataagcacatgtccttggccctgaataggactggcagaagcattgtgtactcctgtgagtggcctctttatatgtggccctttcaaaagcccaattatacagaaatccgacagtactgcaatcactggcgaaattttgctgacattgatgattcctggaaaagtataaagagtatcttggactggacatcttttaaccaggagagaattgttgatgttgctggaccagggggttggaatgacccagatatgttagtgattggcaactttggcctcagctggaaccagcaagtaactcagatggccctctgggctatcatggctggtcctttattcatgtctaatgacctccgacacatcagccctcaagccaaagctctccttcaggataaggacgtaattgccatcaatcaggaccccttgggcaagcaagggtaccagcttagacagggagacaactttgaagtgtgggaacgacctctctcaggcttagcctgggctgtagctatgataaaccggcaggagattggtggacctcgctcttataccatcgcagttgcttccctgggtaaaggagtggcctgtaatcctgcctgcttcatcacacagctcctccctgtgaaaaggaagctagggttctatgaatggacttcaaggttaagaagtcacataaatcccacaggcactgttttgcttcagctagaaaatacaatgcagatgtcattaaaagacttactt

SEQ ID NO: 450 - protein, 398 aa, Artificial Sequence
  variant of human alpha-galactosidase A
LDNGLARTPPMGWLHWERFMCNLDCQEEPDSCISEKLFMEMAELMVSEGWKDAGYEYLCIDDCWMAPQRDSEGRLQADPQRFPHGIRQLANYVHSKGLKLGIYADVGNKTCAGFPGSFGYYDIDAQTFADWGVDLLKFDGCYCDSLENLADGYKHMSLALNRTGRSIVYSCEWPLYMWPFQKPNYTEIRQYCNHWRNFADIDDSWKSIKSILDWTSFNQERIVDVAGPGGWNDPDMLVIGNFGLSWNQQVTQMALWAIMAGPLFMSNDLRHISPQAKALLQDKDVIAINQDPLGKQGYQLRQGDNFEVWERPLSGLAWAVAMINRQEIGGPRSYTIAVASLGKGVACNPACFITQLLPVKRKLGFYEWTSRLRSHINPTGTVLLQLENTMQMSLKDLL

SEQ ID NO: 451 - DNA, 1194 bp, Artificial Sequence
  variant of human alpha-galactosidase A
ctggacaatggattggcaaggacgcctccaatgggctggctgcactgggagcgcttcatgtgcaaccttgactgccaggaagagccagattcctgcatcagtgagaagctcttcatggagatggcagagctcatggtctcagaaggctggaaggatgcaggttatgagtacctctgcattgatgactgttggatggctccccaaagagattcagaaggcagacttcaggcagaccctcagcgctttcctcatgggattcgccagctagctaattatgttcacagcaaaggactgaagctagggatttatgcagatgttggaaataaaacctgcgcaggcttccctgggagttttggatactacgacattgatgcccagacctttgctgactggggagtagatctgctaaaatttgatggttgttactgtgacagtttggaaaatttggcagatggttataagcacatgtccttggccctgaataggactggcagaagcattgtgtactcctgtgagtggcctctttatatgtggccctttcaaaagcccaattatacagaaatccgacagtactgcaatcactggcgaaattttgctgacattgatgattcctggaagagtataaagagtatcttggactggacatcttttaaccaggagagaattgttgatgttgctggaccagggggttggaatgacccagatatgttagtgattggcaactttggcctcagctggaatcagcaagtaactcagatggccctctgggctatcatggctgctcctttattcatgtctaatgacctccgacacatcagccctcaagccaaagctctccttcaggataaggacgtaattgccatcaatcaggaccccttgggcaagcaagggtaccagcttagacagggagacaactttgaagtgtgggaacgacctctctcaggcttagcctgggctgtagctatgataaaccggcaggagattggtggacctcgctcttataccatccccgttgcttccctgggtaaaggagtggcctgtaatcctgcctgcttcatcacacagctcctccctgtgaaaaggaagctagggttctatgaatggacttcaaggttaagaagtcacataaatcccacaggcactgttttgcttcagctagaaaatacaatgcagacctcattaaaagacttactt

SEQ ID NO: 452 - protein, 398 aa, Artificial Sequence
  variant of human alpha-galactosidase A
LDNGLARTPPMGWLHWERFMCNLDCQEEPDSCISEKLFMEMAELMVSEGWKDAGYEYLCIDDCWMAPQRDSEGRLQADPQRFPHGIRQLANYVHSKGLKLGIYADVGNKTCAGFPGSFGYYDIDAQTFADWGVDLLKFDGCYCDSLENLADGYKHMSLALNRTGRSIVYSCEWPLYMWPFQKPNYTEIRQYCNHWRNFADIDDSWKSIKSILDWTSFNQERIVDVAGPGGWNDPDMLVIGNFGLSWNQQVTQMALWAIMAAPLFMSNDLRHISPQAKALLQDKDVIAINQDPLGKQGYQLRQGDNFEVWERPLSGLAWAVAMINRQEIGGPRSYTIPVASLGKGVACNPACFITQLLPVKRKLGFYEWTSRLRSHINPTGTVLLQLENTMQTSLKDLL

SEQ ID NO: 453 - DNA, 1194 bp, Artificial Sequence
  variant of human alpha-galactosidase A
ctggacaatggattggcaaggacgcctccaatgggctggctgcactgggagcgcttcatgtgcaaccttgactgccaggaagagccagattcctgcatcagtgagaagctcttcatggagatggcagagctcatggtctcagaaggctggaaggatgcaggttatgagtacctctgcattgatgactgttggatggctccccaaagagattcagaaggcagacttcaggcagaccctcagcgctttcctcatgggattcgccagctagctaattatgttcacagcaaaggactgaagctagggatttatgcagatgttggaaataaaacctgcgcaggcttccctgggagttttggatactacgacattgatgcccagacctttgctgactggggagtagatctgctaaaatttgatggttgttactgtgacagtttggaaaatttggcagatggttataagcacatgtccttggccctgaataggactggcagaagcattgtgtactcctgtgagtggcctctttatatgtggccctttcaaaagcccaattatacagaaatccgacagtactgcaatcactggcgaaattttgctgacattgatgattcctggaaaagtataaagagtatcttggactggacatcttttaaccaggagagaattgttgatgttgctggaccagggggttggaatgacccagatatgttagtgattggcaactttggcctcagctggaatcagcaagtaactcagatggccctctgggctatcatggctgctcctttattcatgtctaatgacctccgagccatcagccctcaagccaaagctctccttcaggataaggacgtaattgccatcaatcaggaccccttgggcaagcaagggtaccagcttagaaagggagacaactttgaagtgtgggaacgacctctctcaggcttagcctgggctgtagctatgataaaccggcaggagattggtggacctcgctcttataccatcgcagttgcttccctgggtaaaggagtggcctgtaatcctgcctgcttcatcacacagctcctccctgtgaaaaggaagctagggttctatgaatggacttcaaggttaagaagtcacataaatcccacaggcactgttttgcttcagctagaaaatacaatgcagatgtcattaaaagacttactt

SEQ ID NO: 454 - protein, 398 aa, Artificial Sequence
  variant of human alpha-galactosidase A
LDNGLARTPPMGWLHWERFMCNLDCQEEPDSCISEKLFMEMAELMVSEGWKDAGYEYLCIDDCWMAPQRDSEGRLQADPQRFPHGIRQLANYVHSKGLKLGIYADVGNKTCAGFPGSFGYYDIDAQTFADWGVDLLKFDGCYCDSLENLADGYKHMSLALNRTGRSIVYSCEWPLYMWPFQKPNYTEIRQYCNHWRNFADIDDSWKSIKSILDWTSFNQERIVDVAGPGGWNDPDMLVIGNFGLSWNQQVTQMALWAIMAAPLFMSNDLRAISPQAKALLQDKDVIAINQDPLGKQGYQLRKGDNFEVWERPLSGLAWAVAMINRQEIGGPRSYTIAVASLGKGVACNPACFITQLLPVKRKLGFYEWTSRLRSHINPTGTVLLQLENTMQMSLKDLL

SEQ ID NO: 455 - DNA, 1194 bp, Artificial Sequence
  variant of human alpha-galactosidase A
ctggacaatggattggcaaggacgcctccaatgggctggctgcactgggagcgcttcatgtgcaaccttgactgccaggaagagccagattcctgcatcagtgagaagctcttcatggagatggcagagctgatggtctctgaaggctggaaggatgcaggttatgagtacctctgcattgatgactgttggatggctccccaaagagattcagaaggcagacttcaggcagaccctcagcgctttcctcatgggattcgccagctagctaattatgttcacagcaaaggactgaagctagggatttatgcagatgttggaaataaaacctgcgcaggcttccctgggagttttggatactacgacattgatgcccagacctttgctgactggggagtagatctgctaaaatttgatggttgttactgtgacagtttggaaaatttggcagatggttataagcacatgtccttggccctgaataggactggcagaagcattgtgtactcctgtgagtggcctctttatatgtggccctttcaaaagcccaattatacagaaatccgacagtactgcaatcactggcgaaattttgctgacattgatgattcctgggccagtataaagagtatcttggactggacatctttcaaccaggagagaattgttgatgttgctggaccagggggttggaatgacccagatatgttagtgattggcaactttggcctcagctggaaccagcaagtaactcagatggccctctgggctatcatggctggtcctttattcatgtctaatgacctccgagccatcagccctcaagccaaagctctccttcaggataaggacgtaattgccatcaatcaggaccccttgggcaagcaagggtaccagcttagacagggagacaactttgaagtgtgggaacgacctctctcaggcgatgcctgggctgtagctatgataaaccggcaggagattggtggacctcgctcttataccatcgccgttgcttccctgggtaaaggagtggcctgtaatcctgcctgcttcatcacacagctcctccctgtgaaaaggaagctagggttctatgaatggacttcaaggttaagaagtcacataaatcccacaggcactgttttgcttcagctagaaaatacaatgcagatgtcattaaaagacttactt

SEQ ID NO: 456 - protein, 398 aa, Artificial Sequence
  variant of human alpha-galactosidase A
LDNGLARTPPMGWLHWERFMCNLDCQEEPDSCISEKLFMEMAELMVSEGWKDAGYEYLCIDDCWMAPQRDSEGRLQADPQRFPHGIRQLANYVHSKGLKLGIYADVGNKTCAGFPGSFGYYDIDAQTFADWGVDLLKFDGCYCDSLENLADGYKHMSLALNRTGRSIVYSCEWPLYMWPFQKPNYTEIRQYCNHWRNFADIDDSWASIKSILDWTSFNQERIVDVAGPGGWNDPDMLVIGNFGLSWNQQVTQMALWAIMAGPLFMSNDLRAISPQAKALLQDKDVIAINQDPLGKQGYQLRQGDNFEVWERPLSGDAWAVAMINRQEIGGPRSYTIAVASLGKGVACNPACFITQLLPVKRKLGFYEWTSRLRSHINPTGTVLLQLENTMQMSLKDLL

SEQ ID NO: 457 - DNA, 1194 bp, Artificial Sequence
  variant of human alpha-galactosidase A
ctggacaatggattggcaaggacgcctccaatgggctggctgcactgggagcgcttcatgtgcaaccttgactgccaggaagagccagattcctgcatcagtgagaagctcttcatggagatggcagagctcatggtctcagaaggctggaaggatgcaggttatgagtacctctgcattgatgactgttggatggctccccaaagagattcagaaggcagacttcaggcagaccctcagcgctttcctcatgggattcgccagctagctaattatgttcacagcaaaggactgaagctagggatttatgcagatgttggaaataaaacctgcgcaggcttccctgggagttttggatactacgacattgatgcccagacctttgctgactggggagtagatctgctaaaatttgatggttgttactgtgacagtttggaaaatttggcagatggttataagcacatgtccttggccctgaataggactggcagaagcattgtgtactcctgtgagtggcctctttatatgtggccctttcaaaagcccaattatacagaaatccgacagtactgcaatcactggcgaaattttgctgacattgatgattcctgggccagtataaagagtatcttggactggacatctaggaaccaggagagaattgttgatgttgctggaccagggggttggaatgacccagatatgttagtgattggcaactttggcctcagctggaaccagcaagtaactcagatggccctctgggctatcatggctgctcctttattcatgtctaatgacctccgagccatcagccctcaagccaaagctctccttcaggataaggacgtaattgccatcaatcaggaccccttgggcaagcaagggtaccagcttagacagggagacaactttgaagtgtgggaacgacctctctcaggcctcgcctgggctgtagctatgataaaccggcaggagattggtggacctcgctcttataccatcgcagttgcttccctgggtaaaggagtggcctgtaatcctgcctgcttcatcacacagctcctccctgtgaaaaggaagctagggttctatgaatggacttcaaggttaagaagtcacataaatcccacaggcactgttttgcttcagctagaaaatacaatgcagatgtcattaaaagacttactt

SEQ ID NO: 458 - protein, 398 aa, Artificial Sequence
  variant of human alpha-galactosidase A
LDNGLARTPPMGWLHWERFMCNLDCQEEPDSCISEKLFMEMAELMVSEGWKDAGYEYLCIDDCWMAPQRDSEGRLQADPQRFPHGIRQLANYVHSKGLKLGIYADVGNKTCAGFPGSFGYYDIDAQTFADWGVDLLKFDGCYCDSLENLADGYKHMSLALNRTGRSIVYSCEWPLYMWPFQKPNYTEIRQYCNHWRNFADIDDSWASIKSILDWTSRNQERIVDVAGPGGWNDPDMLVIGNFGLSWNQQVTQMALWAIMAAPLFMSNDLRAISPQAKALLQDKDVIAINQDPLGKQGYQLRQGDNFEVWERPLSGLAWAVAMINRQEIGGPRSYTIAVASLGKGVACNPACFITQLLPVKRKLGFYEWTSRLRSHINPTGTVLLQLENTMQMSLKDLL

SEQ ID NO: 459 - DNA, 1251 bp, Artificial Sequence
  variant of human alpha-galactosidase A
atggaatggagctgggtctttctcttcttcctgtcagtaacgactggtgtccactccctggacaatggattggcaaggacgcctccaatgggctggctgcactgggagcgcttcatgtgcaaccttgactgccaggaagagccagattcctgcatcagtgagaagctcttcatggagatggcagagctcatggtctcagaaggctggaaggatgcaggttatgagtacctctgcattgatgactgttggatggctccccaaagagattcagaaggcagacttcaggcagaccctcagcgctttcctcatgggattcgccagctagctaattatgttcacagcaaaggactgaagctagggatttatgcagatgttggaaataaaacctgcgcaggcttccctgggagttttggatactacgacattgatgcccagacctttgctgactggggagtagatctgctaaaatttgatggttgttactgtgacagtttggaaaatttggcagatggttataagcacatgtccttggccctgaataggactggcagaagcattgtgtactcctgtgagtggcctctttatatgtggccctttcaaaagcccaattatacagaaatccgacagtactgcaatcactggcgaaattttgctgacattgatgattcctgggccagtataaagagtatcttggactggacatcttttaaccaggagagaattgttgatgttgctggaccagggggttggaatgacccagatatgttagtgattggcaactttggcctcagctgggaccagcaagtaactcagatggccctctgggctatcatggctgctcctttattcatgtctaatgacctccgacacatcagccctcaagccaaagctctccttcaggataaggacgtaattgccatcaatcaggaccccttgggcaagcaagggtaccagcttagacagggagacaactttgaagtgtgggaacgacctctctcaggcttagcctgggctgtagctatgataaaccggcaggagattggtggacctcgctcttataccatcgcagttgcttccctgggtaaaggagtggcctgtaatcctgcctgcttcatcacacagctcctccctgtgaaaaggaagctagggttctatgaatggacttcaaggttaagaagtcacataaatcccacaggcactgttttgcttcagctagaaaatacaatgcagatgtcattaaaagacttactt

SEQ ID NO: 460 - protein, 417 aa, Artificial Sequence
  variant of human alpha-galactosidase A
MEWSWVFLFFLSVTTGVHSLDNGLARTPPMGWLHWERFMCNLDCQEEPDSCISEKLFMEMAELMVSEGWKDAGYEYLCIDDCWMAPQRDSEGRLQADPQRFPHGIRQLANYVHSKGLKLGIYADVGNKTCAGFPGSFGYYDIDAQTFADWGVDLLKFDGCYCDSLENLADGYKHMSLALNRTGRSIVYSCEWPLYMWPFQKPNYTEIRQYCNHWRNFADIDDSWASIKSILDWTSFNQERIVDVAGPGGWNDPDMLVIGNFGLSWDQQVTQMALWAIMAAPLFMSNDLRHISPQAKALLQDKDVIAINQDPLGKQGYQLRQGDNFEVWERPLSGLAWAVAMINRQEIGGPRSYTIAVASLGKGVACNPACFITQLLPVKRKLGFYEWTSRLRSHINPTGTVLLQLENTMQMSLKDLL

SEQ ID NO: 461 - DNA, 1194 bp, Artificial Sequence
  variant of human alpha-galactosidase A
ctggacaatggattggcaaggacgcctccaatgggctggctgcactgggagcgcttcatgtgcaaccttgactgccaggaagagccagattcctgcatcagtgagaagctcttcatggagatggcagagctgatggtctctgaaggctggaaggatgcaggttatgagtacctctgcattgatgactgttggatggctccccaaagagattcagaaggcagacttcaggcagaccctcagcgctttcctcatgggattcgccagctagctaattatgttcacagcaaaggactgaagctagggatttatgcagatgttggaaataaaacctgcgcaggcttccctgggagttttggatactacgacattgatgcccagacctttgctgactggggagtagatctgctaaaatttgatggttgttactgtgacagtttggaaaatttggcagatggttataagcacatgtccttggccctgaataggactggcagaagcattgtgtactcctgtgagtggcctctttatatgtggccctttcaaaagcccaattatacagaaatccgacagtactgcaatcactggcgaaattttgctgacattgatgattcctggaaaagtataaagagtatcttggactggacatctttcaaccaggagagaattgttgatgttgctggaccagggggttggaatgacccagatatgttagtgattggcaactttggcctcagctggaatcagcaagtaactcagatggccctctgggctatcatggctgctcctttattcatgtctaatgacctccgacacatcagccctcaagccaaagctctccttcaggataaggacgtaattgccatcaatcaggaccccttgggcaagcaagggtaccagcttagacagggagacaactttgaagtgtgggaacgacctctctcaggcgatgcctgggctgtagctattataaaccggcaggagattggtggacctcgctcttataccatcgcagttgcttccctgggtaaaggagtggcctgtaatcctgcctgcttcatcacacagctactccctgtgaaaaggaagctagggttctatgaatggacttcaaggttaagaagtcacataaatcccacaggcactgttttgcttcagctagaaaatacaatgcagatgtcattaaaagacttactt

SEQ ID NO: 462 - protein, 398 aa, Artificial Sequence
  variant of human alpha-galactosidase A
LDNGLARTPPMGWLHWERFMCNLDCQEEPDSCISEKLFMEMAELMVSEGWKDAGYEYLCIDDCWMAPQRDSEGRLQADPQRFPHGIRQLANYVHSKGLKLGIYADVGNKTCAGFPGSFGYYDIDAQTFADWGVDLLKFDGCYCDSLENLADGYKHMSLALNRTGRSIVYSCEWPLYMWPFQKPNYTEIRQYCNHWRNFADIDDSWKSIKSILDWTSFNQERIVDVAGPGGWNDPDMLVIGNFGLSWNQQVTQMALWAIMAAPLFMSNDLRHISPQAKALLQDKDVIAINQDPLGKQGYQLRQGDNFEVWERPLSGDAWAVAIINRQEIGGPRSYTIAVASLGKGVACNPACFITQLLPVKRKLGFYEWTSRLRSHINPTGTVLLQLENTMQMSLKDLL

SEQ ID NO: 463 - DNA, 1194 bp, Artificial Sequence
  variant of human alpha-galactosidase A
ctggacaatggattggcaaggacgcctccaatgggctggctgcactgggagcgcttcatgtgcaaccttgactgccaggaagagccagattcctgcatcagtgagaagctcttcatggagatggcagagcggatggtctctgaaggctggaaggatgcaggttatgagtacctctgcattgatgactgttggatggctccccaaagagattcagaaggcagacttcaggcagaccctcagcgctttcctcatgggattcgccagctagctaattatgttcacagcaaaggactgaagctagggatttatgcagatgttggaaataaaacctgcgcaggcttccctgggagttttggatactacgacattgatgcccagacctttgctgactggggagtagatctgctaaaatttgatggttgttactgtgacagtttggaaaatttggcagatggttataagcacatgtccttggccctgaataggactggcagaagcattgtgtactcctgtgagtggcctctttatatgtggccctttcaaaagcccaattatacagaaatccgacagtactgcaatcactggcgaaattttgctgacattgatgattcctggaaaagtataaagagtatcttggactggacatcttttaaccaggagagaattgttgatgttgctggaccagggggttggaatgacccagatatgttagtgattggcaactttggcctcagctggaatcagcaagtaactcagatggccctctgggctatcatggctgctcctttattcatgtctaatgacctccgacacatcagccctcaagccaaagctctccttcaggataaggacgtaattgccatcaatcaggaccccttgggcaagcaagggtaccagcttagacagggagacaactttgaagtgtgggaacgacctctctcaggcttagcctgggctgtagctatgataaaccggcaggagattggtggacctcgctcttataccatcgcagttgcttccctgggtaaaggagtggcctgtaatcctgcctgcttcatcacacagctcctccctgtgaaaaggaagctagggttctatgaatggacttcaaggttaagaagtcacataaatcccacaggcactgttttgcttcagctagaaaatacaatgcagatgtcattaaaagacttactt

SEQ ID NO: 464 - protein, 398 aa, Artificial Sequence
  variant of human alpha-galactosidase A
LDNGLARTPPMGWLHWERFMCNLDCQEEPDSCISEKLFMEMAERMVSEGWKDAGYEYLCIDDCWMAPQRDSEGRLQADPQRFPHGIRQLANYVHSKGLKLGIYADVGNKTCAGFPGSFGYYDIDAQTFADWGVDLLKFDGCYCDSLENLADGYKHMSLALNRTGRSIVYSCEWPLYMWPFQKPNYTEIRQYCNHWRNFADIDDSWKSIKSILDWTSFNQERIVDVAGPGGWNDPDMLVIGNFGLSWNQQVTQMALWAIMAAPLFMSNDLRHISPQAKALLQDKDVIAINQDPLGKQGYQLRQGDNFEVWERPLSGLAWAVAMINRQEIGGPRSYTIAVASLGKGVACNPACFITQLLPVKRKLGFYEWTSRLRSHINPTGTVLLQLENTMQMSLKDLL

SEQ ID NO: 465 - DNA, 1194 bp, Artificial Sequence
  variant of human alpha-galactosidase A
ctggacaatggattggcaaggacgcctccaatgggctggctgcactgggagcgcttcatgtgcaaccttgactgccaggaagagccagattcctgcatcagtgagaagctcttcatggagatggcagagcggatggtctctgaaggctggaaggatgcaggttatgagtacctctgcattgatgactgttggatggctccccaaagagattcagaaggcagacttcaggcagaccctcagcgctttcctcatgggattcgccagctagctaattatgttcacagcaaaggactgaagctagggatttatgcagatgttggaaataaaacctgcgcaggcttccctgggagttttggatactacgacattgatgcccagacctttgctgactggggagtagatctgctaaaatttgatggttgttactgtgacagtttggaaaatttggcagatggttataagcacatgtccttggccctgaataggactggcagaagcattgtgtactcctgtgagtggcctctttatatgtggccctttcaaaagcccaattatacagaaatccgacagtactgcaatcactggcgaaattttgctgacattgatgattcctggaagagtataaagagtatcttggactggacatcttttaaccaggagagaattgttgatgttgctggaccagggggttggaatgacccagatatgttagtgattggcaactttggcctcagctggaatcagcaagtaactcagatggccctctgggctatcatggctggtcctttattcatgtctaatgacctccgacacatcagccctcaagccaaagctctccttcaggataaggacgtaattgccatcaatcaggaccccttgggcaagcaagggtaccagcttagaaagggagacaactttgaagtgtgggaacgacctctctcaggcgatgcctgggctgtagctatgataaaccggcaggagattggtggacctcgctcttataccatcgcagttgcttccctgggtaaaggagtggcctgtaatcctgcctgcttcatcacacagctcctccctgtgaaaaggaagctagggttctatgaatggacttcaaggttaagaagtcacataaatcccacaggcactgttttgcttcagctagaaaatacaatgcagatgtcattaaaagacttactt

SEQ ID NO: 466 - protein, 398 aa, Artificial Sequence
  variant of human alpha-galactosidase A
LDNGLARTPPMGWLHWERFMCNLDCQEEPDSCISEKLFMEMAERMVSEGWKDAGYEYLCIDDCWMAPQRDSEGRLQADPQRFPHGIRQLANYVHSKGLKLGIYADVGNKTCAGFPGSFGYYDIDAQTFADWGVDLLKFDGCYCDSLENLADGYKHMSLALNRTGRSIVYSCEWPLYMWPFQKPNYTEIRQYCNHWRNFADIDDSWKSIKSILDWTSFNQERIVDVAGPGGWNDPDMLVIGNFGLSWNQQVTQMALWAIMAGPLFMSNDLRHISPQAKALLQDKDVIAINQDPLGKQGYQLRKGDNFEVWERPLSGDAWAVAMINRQEIGGPRSYTIAVASLGKGVACNPACFITQLLPVKRKLGFYEWTSRLRSHINPTGTVLLQLENTMQMSLKDLL

SEQ ID NO: 467 - DNA, 1251 bp, Artificial Sequence
  variant of human alpha-galactosidase A
atggaatggagctgggtctttctcttcttcctgtcagtaacgactggtgtccactccctggacaatggattggcaaggacgcctccaatgggctggctgcactgggagcgcttcatgtgcaaccttgactgccaggaagagccagattcctgcatcagtgagaagctcttcatggagatggcagagcggatggtctctgaaggctggaaggatgcaggttatgagtacctctgcattgatgactgttggatggctccccaaagagattcagaaggcagacttcaggcagaccctcagcgctttcctcatgggattcgccagctagctaattatgttcacagcaaaggactgaagctagggatttatgcagatgttggaaataaaacctgcgcaggcttccctgggagttttggatactacgacattgatgcccagacctttgctgactggggagtagatctgctaaaatttgatggttgttactgtgacagtttggaaaatttggcagatggttataagcacatgtccttggccctgaataggactggcagaagcattgtgtactcctgtgagtggcctctttatatgtggccctttcaaaagcccaattatacagaaatccgacagtactgcaatcactggcgaaattttgctgacattgatgattcctggaaaagtataaagagtatcttggactggacatctttcaaccaggagagaattgttgatgttgctggaccagggggttggaatgacccagatatgttagtgattggcaactttggcctcagctggaatcagcaagtaactcagatggccctctgggctatcatggctgctcctttattcatgtctaatgacctccgacacatcagccctcaagccaaagctctccttcaggataaggacgtaattgccatcaatcaggaccccttgggcaagcaagggtaccagcttagaaagggagacaactttgaagtgtgggaacgacctctctcaggcttagcctgggctgtagctatgataaaccggcaggagattggtggacctcgctcttataccatccccgttgcttccctgggtaaaggagtggcctgtaatcctgcctgcttcatcacacagctcctccctgtgaaaaggaagctagggttctatgaagctacttcaaggttaagaagtcacataaatcccacaggcactgttttgcttcagctagaaaatacaatgcagatgtcattaaaagacttactt

SEQ ID NO: 468 - protein, 417 aa, Artificial Sequence
  variant of human alpha-galactosidase A
MEWSWVFLFFLSVTTGVHSLDNGLARTPPMGWLHWERFMCNLDCQEEPDSCISEKLFMEMAERMVSEGWKDAGYEYLCIDDCWMAPQRDSEGRLQADPQRFPHGIRQLANYVHSKGLKLGIYADVGNKTCAGFPGSFGYYDIDAQTFADWGVDLLKFDGCYCDSLENLADGYKHMSLALNRTGRSIVYSCEWPLYMWPFQKPNYTEIRQYCNHWRNFADIDDSWKSIKSILDWTSFNQERIVDVAGPGGWNDPDMLVIGNFGLSWNQQVTQMALWAIMAAPLFMSNDLRHISPQAKALLQDKDVIAINQDPLGKQGYQLRKGDNFEVWERPLSGLAWAVAMINRQEIGGPRSYTIPVASLGKGVACNPACFITQLLPVKRKLGFYEATSRLRSHINPTGTVLLQLENTMQMSLKDLL

SEQ ID NO: 469 - DNA, 1251 bp, Artificial Sequence
  variant of human alpha-galactosidase A
atggaatggagctgggtctttctcttcttcctgtcagtaacgactggtgtccactccctggacaatggattggcaaggacgcctccaatgggctggctgcactgggagcgcttcatgtgcaaccttgactgccaggaagagccagattcctgcatcagtgagaagctcttcatggagatggcagagcggatggtcactgaaggctggaaggatgcaggttatgagtacctctgcattgatgactgttggatggctccccaaagagattcagaaggcagacttcaggcagaccctcagcgctttcctcatgggattcgccagctagctaattatgttcacagcaaaggactgaagctagggatttatgcagatgttggaaataaaacctgcgcaggcttccctgggagttttggatactacgacattgatgcccagacctttgctgactggggagtagatctgctaaaatttgatggttgttactgtgacagtttggaaaatttggcagatggttataagcacatgtccttggccctgaataggactggcagaagcattgtgtactcctgtgagtggcctctttatatgtggccctttcaaaagcccaattatacagaaatccgacagtactgcaatcactggcgaaattttgctgacattgatgattcctggaaaagtataaagagtatcttggactggacatcttttaaccaggagagaattgttgatgttgctggaccagggggttggaatgacccagatatgttagtgattggcaactttggcctcagctggaaccagcaagtaactcagatggccctctgggctatcatggctggtcctttattcatgtctaatgacctccgacacatcagccctcaagccaaagctctccttcaggataaggacgtaattgccatcaatcaggaccccttgggcaagcaagggtaccagcttagaaagggagacaactttgaagtgtgggaacgacctctctcaggcctcgcctgggctgtagctattataaaccggcaggagattggtggacctcgctcttataccatcgccgttgcttccctgggtaaaggagtggcctgtaatcctgcctgcttcatcacacagctcctccctgtgaaaaggaagctagggttctatgaagctacttcaaggttaagaagtcacataaatcccacaggcactgttttgcttcagctagaaaatacaatgcagatgtcattaaaagacttactt

SEQ ID NO: 470 - protein, 417 aa, Artificial Sequence
  variant of human alpha-galactosidase A
MEWSWVFLFFLSVTTGVHSLDNGLARTPPMGWLHWERFMCNLDCQEEPDSCISEKLFMEMAERMVTEGWKDAGYEYLCIDDCWMAPQRDSEGRLQADPQRFPHGIRQLANYVHSKGLKLGIYADVGNKTCAGFPGSFGYYDIDAQTFADWGVDLLKFDGCYCDSLENLADGYKHMSLALNRTGRSIVYSCEWPLYMWPFQKPNYTEIRQYCNHWRNFADIDDSWKSIKSILDWTSFNQERIVDVAGPGGWNDPDMLVIGNFGLSWNQQVTQMALWAIMAGPLFMSNDLRHISPQAKALLQDKDVIAINQDPLGKQGYQLRKGDNFEVWERPLSGLAWAVAIINRQEIGGPRSYTIAVASLGKGVACNPACFITQLLPVKRKLGFYEATSRLRSHINPTGTVLLQLENTMQMSLKDLL

SEQ ID NO: 471 - DNA, 1251 bp, Artificial Sequence
  variant of human alpha-galactosidase A
atggaatggagctgggtctttctcttcttcctgtcagtaacgactggtgtccactccctggacaatggattggcaaggacgcctccaatgggctggctgcactgggagcgcttcatgtgcaaccttgactgccaggaagagccagattcctgcatcagtgagaagctcttcatggagatggcagagcggatggtcactgaaggctggaaggatgcaggttatgagtacctctgcattgatgactgttggatggctccccaaagagattcagaaggcagacttcaggcagaccctcagcgctttcctcatgggattcgccagctagctaatcatgttcacagcaaaggactgaagctagggatttatgcagatgttggaaataaaacctgcgcaggcttccctgggagttttggatactacgacattgatgcccagacctttgctgactggggagtagatctgctaaaatttgatggttgttactgtgacagtttggaaaatttggcagatggttataagcacatgtccttggccctgaataggactggcagaagcattgtgtactcctgtgagtggcctctttatatgtggccctttcaaaagcccaattatacagaaatccgacagtactgcaatcactggcgaaattttgctgacattgatgattcctggaagagtataaagagtatcttggactggacatctttcaaccaggagagaattgttgatgttgctggaccagggggttggaatgacccagatatgttagtgattggcaactttggcctcagctgggaccagcaagtaactcagatggccctctgggctatcatggctgctcctttattcatgtctaatgacctccgacacatcagccctcaagccaaagctctccttcaggataaggacgtaattgccatcaatcaggaccccttgggcaagcaagggtaccagcttagacagggagacaactttgaagtgtgggaacgacctctctcaggcttagcctgggctgtagctatgataaaccggcaggagattggtggacctcgctcttataccatcgcagttgcttccctgggtaaaggagtggcctgtaatcctgcctgcttcatcacacagctcctccctgtgaaaaggaagctagggttctatgaatggacttcaaggttaagaagtcacataaatcccacaggcactgttttgcttcagctagaaaatacaatgcagatgtcattaaaagacttactt

SEQ ID NO: 472 - protein, 417 aa, Artificial Sequence
  variant of human alpha-galactosidase A
MEWSWVFLFFLSVTTGVHSLDNGLARTPPMGWLHWERFMCNLDCQEEPDSCISEKLFMEMAERMVTEGWKDAGYEYLCIDDCWMAPQRDSEGRLQADPQRFPHGIRQLANHVHSKGLKLGIYADVGNKTCAGFPGSFGYYDIDAQTFADWGVDLLKFDGCYCDSLENLADGYKHMSLALNRTGRSIVYSCEWPLYMWPFQKPNYTEIRQYCNHWRNFADIDDSWKSIKSILDWTSFNQERIVDVAGPGGWNDPDMLVIGNFGLSWDQQVTQMALWAIMAAPLFMSNDLRHISPQAKALLQDKDVIAINQDPLGKQGYQLRQGDNFEVWERPLSGLAWAVAMINRQEIGGPRSYTIAVASLGKGVACNPACFITQLLPVKRKLGFYEWTSRLRSHINPTGTVLLQLENTMQMSLKDLL

SEQ ID NO: 473 - DNA, 1194 bp, Artificial Sequence
  variant of human alpha-galactosidase A
ctggacaatggattggcaaggacgcctccaatgggctggctgcactgggagcgcttcatgtgcaaccttgactgccaggaagagccagattcctgcatcagtgagaagctcttcatggagatggcagagcggatggtctctgaaggctggaaggatgcaggttatgagtacctctgcattgatgactgttggatggctccccaaagagattcagaaggcagacttcaggcagaccctcagcgctttcctcatgggattcgccagctagctaatcatgttcacagcaaaggactgaagctagggatttatgcagatgttggaaataaaacctgcgcaggcttccctgggagttttggatactacgacattgatgcccagacctttgctgactggggagtagatctgctaaaatttgatggttgttactgtgacagtttggaaaatttggcagatggttataagcacatgtccttggccctgaataggactggcagaagcattgtgtactcctgtgagtggcctctttatatgtggccctttcaaaagcccaattatacagaaatccgacagtactgcaatcactggcgaaattttgctgacattgatgattcctggaagagtataaagagtatcttggactggacatctttcaaccaggagagaattgttgatgttgctggaccagggggttggaatgacccagatatgttagtgattggcaactttggcctcagctggaatcagcaagtaactcagatggccctctgggctatcatggctgctcctttattcatgtctaatgacctccgacacatcagccctcaagccaaagctctccttcaggataaggacgtaattgccatcaatcaggaccccttgggcaagcaagggtaccagcttagacagggagacaactttgaagtgtgggaacgacctctctcaggcgatgcctgggctgtagctattataaaccggcaggagattggtggacctcgctcttataccatcgcagttgcttccctgggtaaaggagtggcctgtaatcctgcctgcttcatcacacagctcctccctgtgaaaaggaagctagggttctatgaatggacttcaaggttaagaagtcacataaatcccacaggcactgttttgcttcagctagaaaatacaatgcagatgtcattaaaagacttactt

SEQ ID NO: 474 - protein, 398 aa, Artificial Sequence
  variant of human alpha-galactosidase A
LDNGLARTPPMGWLHWERFMCNLDCQEEPDSCISEKLFMEMAERMVSEGWKDAGYEYLCIDDCWMAPQRDSEGRLQADPQRFPHGIRQLANHVHSKGLKLGIYADVGNKTCAGFPGSFGYYDIDAQTFADWGVDLLKFDGCYCDSLENLADGYKHMSLALNRTGRSIVYSCEWPLYMWPFQKPNYTEIRQYCNHWRNFADIDDSWKSIKSILDWTSFNQERIVDVAGPGGWNDPDMLVIGNFGLSWNQQVTQMALWAIMAAPLFMSNDLRHISPQAKALLQDKDVIAINQDPLGKQGYQLRQGDNFEVWERPLSGDAWAVAIINRQEIGGPRSYTIAVASLGKGVACNPACFITQLLPVKRKLGFYEWTSRLRSHINPTGTVLLQLENTMQMSLKDLL

SEQ ID NO: 475 - DNA, 1194 bp, Artificial Sequence
  variant of human alpha-galactosidase A
ctggacaatggattggcaaggacgcctccaatgggctggctgcactgggagcgcttcatgtgcaaccttgactgccaggaagagccagattcctgcatcagtgagaagctcttcgaggagatggcagagcggatggtctctgaaggctggaaggatgcaggttatgagtacctctgcattgatgactgttggatggctccccaaagagattcagaaggcagacttcaggcagaccctcagcgctttcctcatgggattcgccagctagctaattatgttcacagcaaaggactgaagctagggatttatgcagatgttggaaataaaacctgcgcaggcttccctgggagttttggatactacgacattgatgcccagacctttgctgactggggagtagatctgctaaaatttgatggttgttactgtgacagtttggaaaatttggcagatggttataagcacatgtccttggccctgaataggactggcagaagcattgtgtactcctgtgagtggcctctttatatgtggccctttcaaaagcccaattatacagaaatccgacagtactgcaatcactggcgaaattttgctgacattgatgattcctggaagagtataaagagtatcttggactggacatctttcaaccaggagagaattgttgatgttgctggaccagggggttggaatgacccagatatgttagtgattggcaactttggcctcagctggaaccagcaagtaactcagatggccctctgggctatcatggctgctcctttattcatgtctaatgacctccgacacatcagccctcaagccaaagctctccttcaggataaggacgtaattgccatcaatcaggaccccttgggcaagcaagggtaccagcttagacagggagacaactttgaagtgtgggaacgacctctctcaggcctcgcctgggctgtagctattataaaccggcaggagattggtggacctcgctcttataccatcgcagttgcttccctgggtaaaggagtggcctgtaatcctgcctgcttcatcacacagctcctccctgtgaaaaggaagctagggttctatgaatggacttcaaggttaagaagtcacataaatcccacaggcactgttttgcttcagctagaaaatacaatgcagatgtcattaaaagacttactt

SEQ ID NO: 476 - protein, 398 aa, Artificial Sequence
  variant of human alpha-galactosidase A
LDNGLARTPPMGWLHWERFMCNLDCQEEPDSCISEKLFEEMAERMVSEGWKDAGYEYLCIDDCWMAPQRDSEGRLQADPQRFPHGIRQLANYVHSKGLKLGIYADVGNKTCAGFPGSFGYYDIDAQTFADWGVDLLKFDGCYCDSLENLADGYKHMSLALNRTGRSIVYSCEWPLYMWPFQKPNYTEIRQYCNHWRNFADIDDSWKSIKSILDWTSFNQERIVDVAGPGGWNDPDMLVIGNFGLSWNQQVTQMALWAIMAAPLFMSNDLRHISPQAKALLQDKDVIAINQDPLGKQGYQLRQGDNFEVWERPLSGLAWAVAIINRQEIGGPRSYTIAVASLGKGVACNPACFITQLLPVKRKLGFYEWTSRLRSHINPTGTVLLQLENTMQMSLKDLL

SEQ ID NO: 477 - DNA, 1194 bp, Artificial Sequence
  variant of human alpha-galactosidase A
ctggacaatggattggcaaggacgcctccaatgggctggctgcactgggagcgcttcatgtgcaaccttgactgccaggaagagccagattcctgcatcagtgagaagctcttcgaggagatggcagagctgatggtctctgaaggctggaaggatgcaggttatgagtacctctgcattgatgactgttggatggctccccaaagagattcagaaggcagacttcaggcagaccctcagcgctttcctcatgggattcgccagctagctaatcatgttcacagcaaaggactgaagctagggatttatgcagatgttggaaataaaacctgcgcaggcttccctgggagttttggatactacgacattgatgcccagacctttgctgactggggagtagatctgctaaaatttgatggttgttactgtgacagtttggaaaatttggcagatggttataagcacatgtccttggccctgaataggactggcagaagcattgtgtactcctgtgagtggcctctttatatgtggccctttcaaaagcccaattatacagaaatccgacagtactgcaatcactggcgaaattttgctgacattgatgattcctgggccagtataaagagtatcttggactggacatctaggaaccaggagagaattgttgatgttgctggaccagggggttggaatgacccagatatgttagtgattggcaactttggcctcagctggaatcagcaagtaactcagatggccctctgggctatcatggctgctcctttattcatgtctaatgacctccgagccatcagccctcaagccaaagctctccttcaggataaggacgtaattgccatcaatcaggaccccttgggcaagcaagggtaccagcttagacagggagacaactttgaagtgtgggaacgacctctctcaggcttagcctgggctgtagctatgataaaccggcaggagattggtggacctcgctcttataccatcgccgttgcttccctgggtaaaggagtggcctgtaatcctgcctgcttcatcacacagctcctccctgtgaaaaggaagctagggttctatgaatggacttcaaggttaagaagtcacataaatcccacaggcactgttttgcttcagctagaaaatacaatgcagatgtcattaaaagacttactt

SEQ ID NO: 478 - protein, 398 aa, Artificial Sequence
  variant of human alpha-galactosidase A
LDNGLARTPPMGWLHWERFMCNLDCQEEPDSCISEKLFEEMAELMVSEGWKDAGYEYLCIDDCWMAPQRDSEGRLQADPQRFPHGIRQLANHVHSKGLKLGIYADVGNKTCAGFPGSFGYYDIDAQTFADWGVDLLKFDGCYCDSLENLADGYKHMSLALNRTGRSIVYSCEWPLYMWPFQKPNYTEIRQYCNHWRNFADIDDSWASIKSILDWTSRNQERIVDVAGPGGWNDPDMLVIGNFGLSWNQQVTQMALWAIMAAPLFMSNDLRAISPQAKALLQDKDVIAINQDPLGKQGYQLRQGDNFEVWERPLSGLAWAVAMINRQEIGGPRSYTIAVASLGKGVACNPACFITQLLPVKRKLGFYEWTSRLRSHINPTGTVLLQLENTMQMSLKDLL

SEQ ID NO: 479 - DNA, 1251 bp, Artificial Sequence
  variant of human alpha-galactosidase A
atggaatggagctgggtctttctcttcttcctgtcagtaacgactggtgtccactccctggacaatggattggcaaggacgcctccaatgggctggctgcactgggagcgcttcatgtgcaaccttgactgccaggaagagccagattcctgcatcagtgagaagctcttcgaggagatggcagagctgatggtctctgaaggctggaaggatgcaggttatgagtacctctgcattgatgactgttggatggctccccaaagagattcagaaggcagacttcaggcagaccctcagcgctttcctcatgggattcgccagctagctaatcatgttcacagcaaaggactgaagctagggatttatgcagatgttggaaataaaacctgcgcaggcttccctgggagttttggatactacgacattgatgcccagacctttgctgactggggagtagatctgctaaaatttgatggttgttactgtgacagtttggaaaatttggcagatggttataagcacatgtccttggccctgaataggactggcagaagcattgtgtactcctgtgagtggcctctttatatgtggccctttcaaaagcccaattatacagaaatccgacagtactgcaatcactggcgaaattttgctgacattgatgattcctggaaaagtataaagagtatcttggactggacatctttcaaccaggagagaattgttgatgttgctggaccagggggttggaatgacccagatatgttagtgattggcaactttggcctcagctgggaccagcaagtaactcagatggccctctgggctatcatggctgctcctttattcatgtctaatgacctccgacacatcagccctcaagccaaagctctccttcaggataaggacgtaattgccatcaatcaggaccccttgggcaagcaagggtaccagcttagacagggagacaactttgaagtgtgggaacgacctctctcaggcttagcctgggctgtagctatgataaaccggcaggagattggtggacctcgctcttataccatcgcagttgcttccctgggtaaaggagtggcctgtaatcctgcctgcttcatcacacagctcctccctgtgaaaaggaagctagggttctatgaatggacttcaaggttaagaagtcacataaatcccacaggcactgttttgcttcagctagaaaatacaatgcagatgtcattaaaagacttactt

SEQ ID NO: 480 - protein, 417 aa, Artificial Sequence
  variant of human alpha-galactosidase A
MEWSWVFLFFLSVTTGVHSLDNGLARTPPMGWLHWERFMCNLDCQEEPDSCISEKLFEEMAELMVSEGWKDAGYEYLCIDDCWMAPQRDSEGRLQADPQRFPHGIRQLANHVHSKGLKLGIYADVGNKTCAGFPGSFGYYDIDAQTFADWGVDLLKFDGCYCDSLENLADGYKHMSLALNRTGRSIVYSCEWPLYMWPFQKPNYTEIRQYCNHWRNFADIDDSWKSIKSILDWTSFNQERIVDVAGPGGWNDPDMLVIGNFGLSWDQQVTQMALWAIMAAPLFMSNDLRHISPQAKALLQDKDVIAINQDPLGKQGYQLRQGDNFEVWERPLSGLAWAVAMINRQEIGGPRSYTIAVASLGKGVACNPACFITQLLPVKRKLGFYEWTSRLRSHINPTGTVLLQLENTMQMSLKDLL

SEQ ID NO: 481 - DNA, 1194 bp, Artificial Sequence
  variant of human alpha-galactosidase A
ctggacaatggattggcaaggacgcctccaatgggctggctgcactgggagcgcttcatgtgcaaccttgactgccaggaagagccagattcctgcatcagtgagaagctcttcgaggagatggcagagctgatggtctctgaaggctggaaggatgcaggttatgagtacctctgcattgatgactgttggatggctccccaaagagattcagaaggcagacttcaggcagaccctcagcgctttcctcatgggattcgccagctagctaatcatgttcacagcaaaggactgaagctagggatttatgcagatgttggaaataaaacctgcgcaggcttccctgggagttttggatactacgacattgatgcccagacctttgctgactggggagtagatctgctaaaatttgatggttgttactgtgacagtttggaaaatttggcagatggttataagcacatgtccttggccctgaataggactggcagaagcattgtgtactcctgtgagtggcctctttatatgtggccctttcaaaagcccaattatacagaaatccgacagtactgcaatcactggcgaaattttgctgacattgatgattcctggaagagtataaagagtatcttggactggacatcttttaaccaggagagaattgttgatgttgctggaccagggggttggaatgacccagatatgttagtgattggcaactttggcctcagctgggaccagcaagtaactcagatggccctctgggctatcatggctgctcctttattcatgtctaatgacctccgagccatcagccctcaagccaaagctctccttcaggataaggacgtaattgccatcaatcaggaccccttgggcaagcaagggtaccagcttagacagggagacaactttgaagtgtgggaacgacctctctcaggcgatgcctgggctgtagctatgataaaccggcaggagattggtggacctcgctcttataccatcgccgttgcttccctgggtaaaggagtggcctgtaatcctgcctgcttcatcacacagctcctccctgtgaaaaggaagctagggttctatgaatggacttcaaggttaagaagtcacataaatcccacaggcactgttttgcttcagctagaaaatacaatgcagatgtcattaaaagacttactt

SEQ ID NO: 482 - protein, 398 aa, Artificial Sequence
  variant of human alpha-galactosidase A
LDNGLARTPPMGWLHWERFMCNLDCQEEPDSCISEKLFEEMAELMVSEGWKDAGYEYLCIDDCWMAPQRDSEGRLQADPQRFPHGIRQLANHVHSKGLKLGIYADVGNKTCAGFPGSFGYYDIDAQTFADWGVDLLKFDGCYCDSLENLADGYKHMSLALNRTGRSIVYSCEWPLYMWPFQKPNYTEIRQYCNHWRNFADIDDSWKSIKSILDWTSFNQERIVDVAGPGGWNDPDMLVIGNFGLSWDQQVTQMALWAIMAAPLFMSNDLRAISPQAKALLQDKDVIAINQDPLGKQGYQLRQGDNFEVWERPLSGDAWAVAMINRQEIGGPRSYTIAVASLGKGVACNPACFITQLLPVKRKLGFYEWTSRLRSHINPTGTVLLQLENTMQMSLKDLL

SEQ ID NO: 483 - DNA, 1194 bp, Artificial Sequence
  variant of human alpha-galactosidase A
ctggacaatggattggcaaggacgcctccaatgggctggctgcactgggagcgcttcatgtgcaaccttgactgccaggaagagccagattcctgcatcagtgagaagctcttcatggagatggcagagctcatggtctcagaaggctggaaggatgcaggttatgagtacctctgcattgatgactgttggatggctccccaaagagattcagaaggcagacttcaggcagaccctcagcgctttcctcatgggattcgccagctagctaattatgttcacagcaaaggactgaagctagggatttatgcagatgttggaaataaaacctgcgcaggcttccctgggagttttggatactacgacattgatgcccagacctttgctgactggggagtagatctgctaaaatttgatggttgttactgtgacagtttggaaaatttggcagatggttataagcacatgtccttggccctgaataggactggcagaagcattgtgtactcctgtgagtggcctctttatatgtggccctttcaaaagcccaattatacagaaatccgacagtactgcaatcactggcgaaattttgctgacattgatgattcctggaaaagtataaagagtatcttggactggacatcttttaaccaggagagaattgttgatgttgctggaccagggggttggaatgacccagatatgttagtgattggcaactttggcctcagctggaatcagcaagtaactcagatggccctctgggctatcatggctgctcctttattcatgtctaatgacctccgacacatcagccctcaagccaaagctctccttcaggataaggacgtaattgccatcaatcaggaccccttgggcaagcaagggtaccagcttagaaagggagacaactttgaagtgtgggaacgacctctctcaggcttagcctgggctgtagctatgataaaccggcaggagattggtggacctcgctcttataccatcgccgttgcttccctgggtaaaggagtggcctgtaatcctgcctgcttcatcacacagctcctccctgtgaaaaggaagctagggttctatgaatggacttcaaggttaagaagtcacataaatcccacaggcactgttttgcttcagctagaaaatacaatgcagatgtcattaaaagacttactt

SEQ ID NO: 484 - protein, 398 aa, Artificial Sequence
  variant of human alpha-galactosidase A
LDNGLARTPPMGWLHWERFMCNLDCQEEPDSCISEKLFMEMAELMVSEGWKDAGYEYLCIDDCWMAPQRDSEGRLQADPQRFPHGIRQLANYVHSKGLKLGIYADVGNKTCAGFPGSFGYYDIDAQTFADWGVDLLKFDGCYCDSLENLADGYKHMSLALNRTGRSIVYSCEWPLYMWPFQKPNYTEIRQYCNHWRNFADIDDSWKSIKSILDWTSFNQERIVDVAGPGGWNDPDMLVIGNFGLSWNQQVTQMALWAIMAAPLFMSNDLRHISPQAKALLQDKDVIAINQDPLGKQGYQLRKGDNFEVWERPLSGLAWAVAMINRQEIGGPRSYTIAVASLGKGVACNPACFITQLLPVKRKLGFYEWTSRLRSHINPTGTVLLQLENTMQMSLKDLL

SEQ ID NO: 485 - DNA, 1194 bp, Artificial Sequence
  variant of human alpha-galactosidase A
ctggacaatggattggcaaggacgcctccaatgggctggctgcactgggagcgcttcatgtgcaaccttgactgccaggaagagccagattcctgcatcagtgagaagctcttcatggagatggcagagctcatggtctctgaaggctggaaggatgcaggttatgagtacctctgcattgatgactgttggatggctccccaaagagattcagaaggcagacttcaggcagaccctcagcgctttcctcatgggattcgccagctagctaattatgttcacagcaaaggactgaagctagggatttatgcagatgttggaaataaaacctgcgcaggcttccctgggagttttggatactacgacattgatgcccagacctttgctgactggggagtagatctgctaaaatttgatggttgttactgtgacagtttggaaaatttggcagatggttataagcacatgtccttggccctgaataggactggcagaagcattgtgtactcctgtgagtggcctctttatatgtggccctttcaaaagcccaattatacagaaatccgacagtactgcaatcactggcgaaattttgctgacattgatgattcctggaaaagtataaagagtatcttggactggacatcttttaaccaggagagaattgttgatgttgctggaccagggggttggaatgacccagatatgttagtgattggcaactttggcctcagctggaatcagcaagtaactcagatggccctctgggctatcatggctgctcctttattcatgtctaatgacctccgacacatcagccctcaagccaaagctctccttcaggataaggacgtaattgccatcaatcaggaccccttgggcaagcaagggtaccagcttagaaagggagacaactttgaagtgtgggaacgacctctctcaggcgatgcctgggctgtagctatgataaaccggcaggagattggtggacctcgctcttataccatcgcagttgcttccctgggtaaaggagtggcctgtaatcctgcctgcttcatcacacagctcctccctgtgaaaaggaagctagggttctatgaatggacttcaaggttaagaagtcacataaatcccacaggcactgttttgcttcagctagaaaatacaatgcagatgtcattaaaagacttactt

SEQ ID NO: 486 - protein, 398 aa, Artificial Sequence
  variant of human alpha-galactosidase A
LDNGLARTPPMGWLHWERFMCNLDCQEEPDSCISEKLFMEMAELMVSEGWKDAGYEYLCIDDCWMAPQRDSEGRLQADPQRFPHGIRQLANYVHSKGLKLGIYADVGNKTCAGFPGSFGYYDIDAQTFADWGVDLLKFDGCYCDSLENLADGYKHMSLALNRTGRSIVYSCEWPLYMWPFQKPNYTEIRQYCNHWRNFADIDDSWKSIKSILDWTSFNQERIVDVAGPGGWNDPDMLVIGNFGLSWNQQVTQMALWAIMAAPLFMSNDLRHISPQAKALLQDKDVIAINQDPLGKQGYQLRKGDNFEVWERPLSGDAWAVAMINRQEIGGPRSYTIAVASLGKGVACNPACFITQLLPVKRKLGFYEWTSRLRSHINPTGTVLLQLENTMQMSLKDLL

SEQ ID NO: 487 - DNA, 1194 bp, Artificial Sequence
  variant of human alpha-galactosidase A
ctggacaatggattggcaaggacgcctccaatgggctggctgcactgggagcgcttcatgtgcaaccttgactgccaggaagagccagattcctgcatcagtgagaagctcttcatggagatggcagagctcatggtctcagaaggctggaaggatgcaggttatgagtacctctgcattgatgactgttggatggctccccaaagagattcagaaggcagacttcaggcagaccctcagcgctttcctcatgggattcgccagctagctaattatgttcacagcaaaggactgaagctagggatttatgcagatgttggaaataaaacctgcgcaggcttccctgggagttttggatactacgacattgatgcccagacctttgctgactggggagtagatctgctaaaatttgatggttgttactgtgacagtttggaaaatttggcagatggttataagcacatgtccttggccctgaataggactggcagaagcattgtgtactcctgtgagtggcctctttatatgtggccctttcaaaagcccaattatacagaaatccgacagtactgcaatcactggcgaaattttgctgacattgatgattcctggaaaagtataaagagtatcttggactggacatcttttaaccaggagagaattgttgatgttgctggaccagggggttggaatgacccagatatgttagtgattggcaactttggcctcagctggaaccagcaagtaactcagatggccctctgggctatcatggctgctcctttattcatgtctaatgacctccgacacatcagccctcaagccaaagctctccttcaggataaggacgtaattgccatcaatcaggaccccttgggcaagcaagggtaccagcttagaaagggagacaactttgaagtgtgggaacgacctctctcaggcctcgcctgggctgtagctattataaaccggcaggagattggtggacctcgctcttataccatccccgttgcttccctgggtaaaggagtggcctgtaatcctgcctgcttcatcacacagctcctccctgtgaaaaggaagctagggttctatgaatggacttcaaggttaagaagtcacataaatcccacaggcactgttttgcttcagctagaaaatacaatgcagatgtcattaaaagacttactt

SEQ ID NO: 488 - protein, 398 aa, Artificial Sequence
  variant of human alpha-galactosidase A
LDNGLARTPPMGWLHWERFMCNLDCQEEPDSCISEKLFMEMAELMVSEGWKDAGYEYLCIDDCWMAPQRDSEGRLQADPQRFPHGIRQLANYVHSKGLKLGIYADVGNKTCAGFPGSFGYYDIDAQTFADWGVDLLKFDGCYCDSLENLADGYKHMSLALNRTGRSIVYSCEWPLYMWPFQKPNYTEIRQYCNHWRNFADIDDSWKSIKSILDWTSFNQERIVDVAGPGGWNDPDMLVIGNFGLSWNQQVTQMALWAIMAAPLFMSNDLRHISPQAKALLQDKDVIAINQDPLGKQGYQLRKGDNFEVWERPLSGLAWAVAIINRQEIGGPRSYTIPVASLGKGVACNPACFITQLLPVKRKLGFYEWTSRLRSHINPTGTVLLQLENTMQMSLKDLL

SEQ ID NO: 489 - DNA, 1194 bp, Artificial Sequence
  variant of human alpha-galactosidase A
ctggacaatggattggcaaggacgcctccaatgggctggctgcactgggagcgcttcatgtgcaaccttgactgccaggaagagccagattcctgcatcagtgagaagctcttcatggagatggcagagctgatggtcactgaaggctggaaggatgcaggttatgagtacctctgcattgatgactgttggatggctccccaaagagattcagaaggcagacttcaggcagaccctcagcgctttcctcatgggattcgccagctagctaattatgttcacagcaaaggactgaagctagggatttatgcagatgttggaaataaaacctgcgcaggcttccctgggagttttggatactacgacattgatgcccagacctttgctgactggggagtagatctgctaaaatttgatggttgttactgtgacagtttggaaaatttggcagatggttataagcacatgtccttggccctgaataggactggcagaagcattgtgtactcctgtgagtggcctctttatatgtggccctttcaaaagcccaattatacagaaatccgacagtactgcaatcactggcgaaattttgctgacattgatgattcctggaagagtataaagagtatcttggactggacatctaggaaccaggagagaattgttgatgttgctggaccagggggttggaatgacccagatatgttagtgattggcaactttggcctcagctggaaccagcaagtaactcagatggccctctgggctatcatggctgctcctttattcatgtctaatgacctccgacacatcagccctcaagccaaagctctccttcaggataaggacgtaattgccatcaatcaggaccccttgggcaagcaagggtaccagcttagacagggagacaactttgaagtgtgggaacgacctctctcaggcctcgcctgggctgtagctattataaaccggcaggagattggtggacctcgctcttataccatcgccgttgcttccctgggtaaaggagtggcctgtaatcctgcctgcttcatcacacagctcctccctgtgaaaaggaagctagggttctatgaatggacttcaaggttaagaagtcacataaatcccacaggcactgttttgcttcagctagaaaatacaatgcagatgtcattaaaagacttactt

SEQ ID NO: 490 - protein, 398 aa, Artificial Sequence
  variant of human alpha-galactosidase A
LDNGLARTPPMGWLHWERFMCNLDCQEEPDSCISEKLFMEMAELMVTEGWKDAGYEYLCIDDCWMAPQRDSEGRLQADPQRFPHGIRQLANYVHSKGLKLGIYADVGNKTCAGFPGSFGYYDIDAQTFADWGVDLLKFDGCYCDSLENLADGYKHMSLALNRTGRSIVYSCEWPLYMWPFQKPNYTEIRQYCNHWRNFADIDDSWKSIKSILDWTSRNQERIVDVAGPGGWNDPDMLVIGNFGLSWNQQVTQMALWAIMAAPLFMSNDLRHISPQAKALLQDKDVIAINQDPLGKQGYQLRQGDNFEVWERPLSGLAWAVAIINRQEIGGPRSYTIAVASLGKGVACNPACFITQLLPVKRKLGFYEWTSRLRSHINPTGTVLLQLENTMQMSLKDLL

SEQ ID NO: 491 - DNA, 1251 bp, Artificial Sequence
  variant of human alpha-galactosidase A
atggaatggagctgggtctttctcttcttcctgtcagtaacgactggtgtccactccctggacaatggattggcaaggacgcctccaatgggctggctgcactgggagcgcttcatgtgcaaccttgactgccaggaagagccagattcctgcatcagtgagaagctcttcatggagatggcagagctcatggtcactgaaggctggaaggatgcaggttatgagtacctctgcattgatgactgttggatggctccccaaagagattcagaaggcagacttcaggcagaccctcagcgctttcctcatgggattcgccagctagctaattatgttcacagcaaaggactgaagctagggatttatgcagatgttggaaataaaacctgcgcaggcttccctgggagttttggatactacgacattgatgcccagacctttgctgactggggagtagatctgctaaaatttgatggttgttactgtgacagtttggaaaatttggcagatggttataagcacatgtccttggccctgaataggactggcagaagcattgtgtactcctgtgagtggcctctttatatgtggccctttcaaaagcccaattatacagaaatccgacagtactgcaatcactggcgaaattttgctgacattgatgattcctggaaaagtataaagagtatcttggactggacatctaggaaccaggagagaattgttgatgttgctggaccagggggttggaatgacccagatatgttagtgattggcaactttggcctcagctgggaccagcaagtaactcagatggccctctgggctatcatggctgctcctttattcatgtctaatgacctccgacacatcagccctcaagccaaagctctccttcaggataaggacgtaattgccatcaatcaggaccccttgggcaagcaagggtaccagcttagacagggagacaactttgaagtgtgggaacgacctctctcaggcgatgcctgggctgtagctatgataaaccggcaggagattggtggacctcgctcttataccatcgcagttgcttccctgggtaaaggagtggcctgtaatcctgcctgcttcatcacacagctcctccctgtgaaaaggaagctagggttctatgaatggacttcaaggttaagaagtcacataaatcccacaggcactgttttgcttcagctagaaaatacaatgcagacctcattaaaagacttactt

SEQ ID NO: 492 - protein, 417 aa, Artificial Sequence
  variant of human alpha-galactosidase A
MEWSWVFLFFLSVTTGVHSLDNGLARTPPMGWLHWERFMCNLDCQEEPDSCISEKLFMEMAELMVTEGWKDAGYEYLCIDDCWMAPQRDSEGRLQADPQRFPHGIRQLANYVHSKGLKLGIYADVGNKTCAGFPGSFGYYDIDAQTFADWGVDLLKFDGCYCDSLENLADGYKHMSLALNRTGRSIVYSCEWPLYMWPFQKPNYTEIRQYCNHWRNFADIDDSWKSIKSILDWTSRNQERIVDVAGPGGWNDPDMLVIGNFGLSWDQQVTQMALWAIMAAPLFMSNDLRHISPQAKALLQDKDVIAINQDPLGKQGYQLRQGDNFEVWERPLSGDAWAVAMINRQEIGGPRSYTIAVASLGKGVACNPACFITQLLPVKRKLGFYEWTSRLRSHINPTGTVLLQLENTMQTSLKDLL

SEQ ID NO: 493 - DNA, 1251 bp, Artificial Sequence
  variant of human alpha-galactosidase A
atggaatggagctgggtctttctcttcttcctgtcagtaacgactggtgtccactccctggacaatggattggcaaggacgcctccaatgggctggctgcactgggagcgcttcatgtgcaaccttgactgccaggaagagccagattcctgcatcagtgagaagctcttcatggagatggcagagctgatggtcactgaaggctggaaggatgcaggttatgagtacctctgcattgatgactgttggatggctccccaaagagattcagaaggcagacttcaggcagaccctcagcgctttcctcatgggattcgccagctagctaattatgttcacagcaaaggactgaagctagggatttatgcagatgttggaaataaaacctgcgcaggcttccctgggagttttggatactacgacattgatgcccagacctttgctgactggggagtagatctgctaaaatttgatggttgttactgtgacagtttggaaaatttggcagatggttataagcacatgtccttggccctgaataggactggcagaagcattgtgtactcctgtgagtggcctctttatatgtggccctttcaaaagcccaattatacagaaatccgacagtactgcaatcactggcgaaattttgctgacattgatgattcctggaaaagtataaagagtatcttggactggacatcttttaaccaggagagaattgttgatgttgctggaccagggggttggaatgacccagatatgttagtgattggcaactttggcctcagctggaatcagcaagtaactcagatggccctctgggctatcatggctgctcctttattcatgtctaatgacctccgagccatcagccctcaagccaaagctctccttcaggataaggacgtaattgccatcaatcaggaccccttgggcaagcaagggtaccagcttagacagggagacaactttgaagtgtgggaacgacctctctcaggcttagcctgggctgtagctatgataaaccggcaggagattggtggacctcgctcttataccatcgcagttgcttccctgggtaaaggagtggcctgtaatcctgcctgcttcatcacacagctcctccctgtgaaaaggaagctagggttctatgaatggacttcaaggttaagaagtcacataaatcccacaggcactgttttgcttcagctagaaaatacaatgcagatgtcattaaaagacttactt

SEQ ID NO: 494 - protein, 417 aa, Artificial Sequence
  variant of human alpha-galactosidase A
MEWSWVFLFFLSVTTGVHSLDNGLARTPPMGWLHWERFMCNLDCQEEPDSCISEKLFMEMAELMVTEGWKDAGYEYLCIDDCWMAPQRDSEGRLQADPQRFPHGIRQLANYVHSKGLKLGIYADVGNKTCAGFPGSFGYYDIDAQTFADWGVDLLKFDGCYCDSLENLADGYKHMSLALNRTGRSIVYSCEWPLYMWPFQKPNYTEIRQYCNHWRNFADIDDSWKSIKSILDWTSFNQERIVDVAGPGGWNDPDMLVIGNFGLSWNQQVTQMALWAIMAAPLFMSNDLRAISPQAKALLQDKDVIAINQDPLGKQGYQLRQGDNFEVWERPLSGLAWAVAMINRQEIGGPRSYTIAVASLGKGVACNPACFITQLLPVKRKLGFYEWTSRLRSHINPTGTVLLQLENTMQMSLKDLL

SEQ ID NO: 495 - DNA, 1251 bp, Artificial Sequence
  variant of human alpha-galactosidase A
atggaatggagctgggtctttctcttcttcctgtcagtaacgactggtgtccactccctggacaatggattggcaaggacgcctccaatgggctggctgcactgggagcgcttcatgtgcaaccttgactgccaggaagagccagattcctgcatcagtgagaagctcttcatggagatggcagagctcatggtctcagaaggctggaaggatgcaggttatgagtacctctgcattgatgactgttggatggctccccaaagagattcagaaggcagacttcaggcagaccctcagcgctttcctcatgggattcgccagctagctaattatgttcacagcaaaggactgaagctagggatttatgcagatgttggaaataaaacctgcgcaggcttccctgggagttttggatactacgacattgatgcccagacctttgctgactggggagtagatctgctaaaatttgatggttgttactgtgacagtttggaaaatttggcagatggttataagcacatgtccttggccctgaataggactggcagaagcattgtgtactcctgtgagtggcctctttatatgtggccctttcaaaagcccaattatacagaaatccgacagtactgcaatcactggcgaaattttgctgacattgatgattcctggaagagtataaagagtatcttggactggacatcttttaaccaggagagaattgttgatgttgctggaccagggggttggaatgacccagatatgttagtgattggcaactttggcctcagctggaaccagcaagtaactcagatggccctctgggctatcatggctgctcctttattcatgtctaatgacctccgacacatcagccctcaagccaaagctctccttcaggataaggacgtaattgccatcaatcaggaccccttgggcaagcaagggtaccagcttagacagggagacaactttgaagtgtgggaacgacctctctcaggcttagcctgggctgtagctatgataaaccggcaggagattggtggacctcgctcttataccatcgcagttgcttccctgggtaaaggagtggcctgtaatcctgcctgcttcatcacacagctcctccctgtgaaaaggaagctagggttctatgaagctacttcaaggttaagaagtcacataaatcccacaggcactgttttgcttcagctagaaaatacaatgcagatgtcattaaaagacttactt

SEQ ID NO: 496 - protein, 417 aa, Artificial Sequence
  variant of human alpha-galactosidase A
MEWSWVFLFFLSVTTGVHSLDNGLARTPPMGWLHWERFMCNLDCQEEPDSCISEKLFMEMAELMVSEGWKDAGYEYLCIDDCWMAPQRDSEGRLQADPQRFPHGIRQLANYVHSKGLKLGIYADVGNKTCAGFPGSFGYYDIDAQTFADWGVDLLKFDGCYCDSLENLADGYKHMSLALNRTGRSIVYSCEWPLYMWPFQKPNYTEIRQYCNHWRNFADIDDSWKSIKSILDWTSFNQERIVDVAGPGGWNDPDMLVIGNFGLSWNQQVTQMALWAIMAAPLFMSNDLRHISPQAKALLQDKDVIAINQDPLGKQGYQLRQGDNFEVWERPLSGLAWAVAMINRQEIGGPRSYTIAVASLGKGVACNPACFITQLLPVKRKLGFYEATSRLRSHINPTGTVLLQLENTMQMSLKDLL

SEQ ID NO: 497 - DNA, 1194 bp, Artificial Sequence
  variant of human alpha-galactosidase A
ctggacaatggattggcaaggacgcctccaatgggctggctgcactgggagcgcttcatgtgcaaccttgactgccaggaagagccagattcctgcatcagtgagaagctcttcatggagatggcagagctcatggtctcagaaggctggaaggatgcaggttatgagtacctctgcattgatgactgttggatggctccccaaagagattcagaaggcagacttcaggcagaccctcagcgctttcctcatgggattcgccagctagctaatcatgttcacagcaaaggactgaagctagggatttatgcagatgttggaaataaaacctgcgcaggcttccctgggagttttggatactacgacattgatgcccagacctttgctgactggggagtagatctgctaaaatttgatggttgttactgtgacagtttggaaaatttggcagatggttataagcacatgtccttggccctgaataggactggcagaagcattgtgtactcctgtgagtggcctctttatatgtggccctttcaaaagcccaattatacagaaatccgacagtactgcaatcactggcgaaattttgctgacattgatgattcctggaagagtataaagagtatcttggactggacatctttcaaccaggagagaattgttgatgttgctggaccagggggttggaatgacccagatatgttagtgattggcaactttggcctcagctggaatcagcaagtaactcagatggccctctgggctatcatggctgctcctttattcatgtctaatgacctccgacacatcagccctcaagccaaagctctccttcaggataaggacgtaattgccatcaatcaggaccccttgggcaagcaagggtaccagcttagacagggagacaactttgaagtgtgggaacgacctctctcaggcttagcctgggctgtagctatgataaaccggcaggagattggtggacctcgctcttataccatcgcagttgcttccctgggtaaaggagtggcctgtaatcctgcctgcttcatcacacagctcctccctgtgaaaaggaagctagggttctatgaatggacttcaaggttaagaagtcacataaatcccacaggcactgttttgcttcagctagaaaatacaatgcagatgtcattaaaagacttactt

SEQ ID NO: 498 - protein, 398 aa, Artificial Sequence
  variant of human alpha-galactosidase A
LDNGLARTPPMGWLHWERFMCNLDCQEEPDSCISEKLFMEMAELMVSEGWKDAGYEYLCIDDCWMAPQRDSEGRLQADPQRFPHGIRQLANHVHSKGLKLGIYADVGNKTCAGFPGSFGYYDIDAQTFADWGVDLLKFDGCYCDSLENLADGYKHMSLALNRTGRSIVYSCEWPLYMWPFQKPNYTEIRQYCNHWRNFADIDDSWKSIKSILDWTSFNQERIVDVAGPGGWNDPDMLVIGNFGLSWNQQVTQMALWAIMAAPLFMSNDLRHISPQAKALLQDKDVIAINQDPLGKQGYQLRQGDNFEVWERPLSGLAWAVAMINRQEIGGPRSYTIAVASLGKGVACNPACFITQLLPVKRKLGFYEWTSRLRSHINPTGTVLLQLENTMQMSLKDLL

SEQ ID NO: 499 - DNA, 1194 bp, Artificial Sequence
  variant of human alpha-galactosidase A
ctggacaatggattggcaaggacgcctccaatgggctggctgcactgggagcgcttcatgtgcaaccttgactgccaggaagagccagattcctgcatcagtgagaagctcttcatggagatggcagagctgatggtctctgaaggctggaaggatgcaggttatgagtacctctgcattgatgactgttggatggctccccaaagagattcagaaggcagacttcaggcagaccctcagcgctttcctcatgggattcgccagctagctaatcatgttcacagcaaaggactgaagctagggatttatgcagatgttggaaataaaacctgcgcaggcttccctgggagttttggatactacgacattgatgcccagacctttgctgactggggagtagatctgctaaaatttgatggttgttactgtgacagtttggaaaatttggcagatggttataagcacatgtccttggccctgaataggactggcagaagcattgtgtactcctgtgagtggcctctttatatgtggccctttcaaaagcccaattatacagaaatccgacagtactgcaatcactggcgaaattttgctgacattgatgattcctggaaaagtataaagagtatcttggactggacatctaggaaccaggagagaattgttgatgttgctggaccagggggttggaatgacccagatatgttagtgattggcaactttggcctcagctggaatcagcaagtaactcagatggccctctgggctatcatggctggtcctttattcatgtctaatgacctccgacacatcagccctcaagccaaagctctccttcaggataaggacgtaattgccatcaatcaggaccccttgggcaagcaagggtaccagcttagaaagggagacaactttgaagtgtgggaacgacctctctcaggcctcgcctgggctgtagctatgataaaccggcaggagattggtggacctcgctcttataccatccccgttgcttccctgggtaaaggagtggcctgtaatcctgcctgcttcatcacacagctcctccctgtgaaaaggaagctagggttctatgaatggacttcaaggttaagaagtcacataaatcccacaggcactgttttgcttcagctagaaaatacaatgcagatgtcattaaaagacttactt

SEQ ID NO: 500 - protein, 398 aa, Artificial Sequence
  variant of human alpha-galactosidase A
LDNGLARTPPMGWLHWERFMCNLDCQEEPDSCISEKLFMEMAELMVSEGWKDAGYEYLCIDDCWMAPQRDSEGRLQADPQRFPHGIRQLANHVHSKGLKLGIYADVGNKTCAGFPGSFGYYDIDAQTFADWGVDLLKFDGCYCDSLENLADGYKHMSLALNRTGRSIVYSCEWPLYMWPFQKPNYTEIRQYCNHWRNFADIDDSWKSIKSILDWTSRNQERIVDVAGPGGWNDPDMLVIGNFGLSWNQQVTQMALWAIMAGPLFMSNDLRHISPQAKALLQDKDVIAINQDPLGKQGYQLRKGDNFEVWERPLSGLAWAVAMINRQEIGGPRSYTIPVASLGKGVACNPACFITQLLPVKRKLGFYEWTSRLRSHINPTGTVLLQLENTMQMSLKDLL

SEQ ID NO: 501 - DNA, 1194 bp, Artificial Sequence
  variant of human alpha-galactosidase A
ctggacaatggattggcaaggacgcctccaatgggctggctgcactgggagcgcttcatgtgcaaccttgactgccaggaagagccagattcctgcatcagtgagaagctcttcatggagatggcagagctgatggtctctgaaggctggaaggatgcaggttatgagtacctctgcattgatgactgttggatggctccccaaagagattcagaaggcagacttcaggcagaccctcagcgctttcctcatgggattcgccagctagctaatcatgttcacagcaaaggactgaagctagggatttatgcagatgttggaaataaaacctgcgcaggcttccctgggagttttggatactacgacattgatgcccagacctttgctgactggggagtagatctgctaaaatttgatggttgttactgtgacagtttggaaaatttggcagatggttataagcacatgtccttggccctgaataggactggcagaagcattgtgtactcctgtgagtggcctctttatatgtggccctttcaaaagcccaattatacagaaatccgacagtactgcaatcactggcgaaattttgctgacattgatgattcctgggccagtataaagagtatcttggactggacatctaggaaccaggagagaattgttgatgttgctggaccagggggttggaatgacccagatatgttagtgattggcaactttggcctcagctgggaccagcaagtaactcagatggccctctgggctatcatggctgctcctttattcatgtctaatgacctccgacacatcagccctcaagccaaagctctccttcaggataaggacgtaattgccatcaatcaggaccccttgggcaagcaagggtaccagcttagacagggagacaactttgaagtgtgggaacgacctctctcaggcttagcctgggctgtagctatgataaaccggcaggagattggtggacctcgctcttataccatcgcagttgcttccctgggtaaaggagtggcctgtaatcctgcctgcttcatcacacagctcctccctgtgaaaaggaagctagggttctatgaatggacttcaaggttaagaagtcacataaatcccacaggcactgttttgcttcagctagaaaatacaatgcagatgtcattaaaagacttactt

SEQ ID NO: 502 - protein, 398 aa, Artificial Sequence
  variant of human alpha-galactosidase A
LDNGLARTPPMGWLHWERFMCNLDCQEEPDSCISEKLFMEMAELMVSEGWKDAGYEYLCIDDCWMAPQRDSEGRLQADPQRFPHGIRQLANHVHSKGLKLGIYADVGNKTCAGFPGSFGYYDIDAQTFADWGVDLLKFDGCYCDSLENLADGYKHMSLALNRTGRSIVYSCEWPLYMWPFQKPNYTEIRQYCNHWRNFADIDDSWASIKSILDWTSRNQERIVDVAGPGGWNDPDMLVIGNFGLSWDQQVTQMALWAIMAAPLFMSNDLRHISPQAKALLQDKDVIAINQDPLGKQGYQLRQGDNFEVWERPLSGLAWAVAMINRQEIGGPRSYTIAVASLGKGVACNPACFITQLLPVKRKLGFYEWTSRLRSHINPTGTVLLQLENTMQMSLKDLL

SEQ ID NO: 503 - DNA, 1194 bp, Artificial Sequence
  variant of human alpha-galactosidase A
ctggacaatggattggcaaggacgcctccaatgggctggctgcactgggagcgcttcatgtgcaaccttgactgccaggaagagccagattcctgcatcagtgagaagctcttcatggagatggcagagctgatggtctctgaaggctggaaggatgcaggttatgagtacctctgcattgatgactgttggatggctccccaaagagattcagaaggcagacttcaggcagaccctcagcgctttcctcatgggattcgccagctagctaatcatgttcacagcaaaggactgaagctagggatttatgcagatgttggaaataaaacctgcgcaggcttccctgggagttttggatactacgacattgatgcccagacctttgctgactggggagtagatctgctaaaatttgatggttgttactgtgacagtttggaaaatttggcagatggttataagcacatgtccttggccctgaataggactggcagaagcattgtgtactcctgtgagtggcctctttatatgtggccctttcaaaagcccaattatacagaaatccgacagtactgcaatcactggcgaaattttgctgacattgatgattcctgggccagtataaagagtatcttggactggacatcttttaaccaggagagaattgttgatgttgctggaccagggggttggaatgacccagatatgttagtgattggcaactttggcctcagctgggaccagcaagtaactcagatggccctatgggctatcatggctgctcctttattcatgtctaatgacctccgacacatcagccctcaagccaaagctctccttcaggataaggacgtaattgccatcaatcaggaccccttgggcaagcaagggtaccagcttagacagggagacaactttgaagtgtgggaacgacctctctcaggcgatgcctgggctgtagctattataaaccggcaggagattggtggacctcgctcttataccatcgccgttgcttccctgggtaaaggagtggcctgtaatcctgcctgcttcatcacacagctcctccctgtgaaaaggaagctagggttctatgaatggacttcaaggttaagaagtcacataaatcccacaggcactgttttgcttcagctagaaaatacaatgcagacctcattaaaagacttactt

SEQ ID NO: 504 - protein, 398 aa, Artificial Sequence
  variant of human alpha-galactosidase A
LDNGLARTPPMGWLHWERFMCNLDCQEEPDSCISEKLFMEMAELMVSEGWKDAGYEYLCIDDCWMAPQRDSEGRLQADPQRFPHGIRQLANHVHSKGLKLGIYADVGNKTCAGFPGSFGYYDIDAQTFADWGVDLLKFDGCYCDSLENLADGYKHMSLALNRTGRSIVYSCEWPLYMWPFQKPNYTEIRQYCNHWRNFADIDDSWASIKSILDWTSFNQERIVDVAGPGGWNDPDMLVIGNFGLSWDQQVTQMALWAIMAAPLFMSNDLRHISPQAKALLQDKDVIAINQDPLGKQGYQLRQGDNFEVWERPLSGDAWAVAIINRQEIGGPRSYTIAVASLGKGVACNPACFITQLLPVKRKLGFYEWTSRLRSHINPTGTVLLQLENTMQTSLKDLL

SEQ ID NO: 505 - DNA, 1194 bp, Artificial Sequence
  variant of human alpha-galactosidase A
ctggacaatggattggcaaggacgcctccaatgggctggctgcactgggagcgcttcatgtgcaaccttgactgccaggaagagccagattcctgcatcagtgagaagctcttcatggagatggcagagctcatggtctcagaaggctggaaggatgcaggttatgagtacctctgcattgatgactgttggatggctccccaaagagattcagaaggcagacttcaggcagaccctcagcgctttcctcatgggattcgccagctagctaatcatgttcacagcaaaggactgaagctagggatttatgcagatgttggaaataaaacctgcgcaggcttccctgggagttttggatactacgacattgatgcccagacctttgctgactggggagtagatctgctaaaatttgatggttgttactgtgacagtttggaaaatttggcagatggttataagcacatgtccttggccctgaataggactggcagaagcattgtgtactcctgtgagtggcctctttatatgtggccctttcaaaagcccaattatacagaaatccgacagtactgcaatcactggcgaaattttgctgacattgatgattcctgggccagtataaagagtatcttggactggacatcttttaaccaggagagaattgttgatgttgctggaccagggggttggaatgacccagatatgttagtgattggcaactttggcctcagctgggaccagcaagtaactcagatggccctctgggctatcatggctgctcctttattcatgtctaatgacctccgacacatcagccctcaagccaaagctctccttcaggataaggacgtaattgccatcaatcaggaccccttgggcaagcaagggtaccagcttagacagggagacaactttgaagtgtgggaacgacctctctcaggcctcgcctgggctgtagctattataaaccggcaggagattggtggacctcgctcttataccatcgccgttgcttccctgggtaaaggagtggcctgtaatcctgcctgcttcatcacacagctcctccctgtgaaaaggaagctagggttctatgaagctacttcaaggttaagaagtcacataaatcccacaggcactgttttgcttcagctagaaaatacaatgcagatgtcattaaaagacttactt

SEQ ID NO: 506 - protein, 398 aa, Artificial Sequence
  variant of human alpha-galactosidase A
LDNGLARTPPMGWLHWERFMCNLDCQEEPDSCISEKLFMEMAELMVSEGWKDAGYEYLCIDDCWMAPQRDSEGRLQADPQRFPHGIRQLANHVHSKGLKLGIYADVGNKTCAGFPGSFGYYDIDAQTFADWGVDLLKFDGCYCDSLENLADGYKHMSLALNRTGRSIVYSCEWPLYMWPFQKPNYTEIRQYCNHWRNFADIDDSWASIKSILDWTSFNQERIVDVAGPGGWNDPDMLVIGNFGLSWDQQVTQMALWAIMAAPLFMSNDLRHISPQAKALLQDKDVIAINQDPLGKQGYQLRQGDNFEVWERPLSGLAWAVAIINRQEIGGPRSYTIAVASLGKGVACNPACFITQLLPVKRKLGFYEATSRLRSHINPTGTVLLQLENTMQMSLKDLL

SEQ ID NO: 507 - DNA, 1194 bp, Artificial Sequence
  variant of human alpha-galactosidase A
ctggacaatggattggcaaggacgcctacaatgggctggctgcactgggagcgcttcatgtgcaaccttgactgccaggaagagccagattcctgcatcagtgagaagctcttcatggagatggcagagctgatggtctctgaaggctggaaggatgcaggttatgagtacctctgcattgatgactgttggatggctccccaaagagattcagaaggcagacttcaggcagaccctcagcgctttcctcatgggattcgccagctagctaattatgttcacagcaaaggactgaagctagggatttatgcagatgttggaaataaaacctgcgcaggcttccctgggagttttggatactacgacattgatgcccagacctttgctgactggggagtagatctgctaaaatttgatggttgttactgtgacagtttggaaaatttggcagatggttataagcacatgtccttggccctgaataggactggcagaagcattgtgtactcctgtgagtggcctctttatatgtggccctttcaaaagcccaattatacagaaatccgacagtactgcaatcactggcgaaattttgctgacattgatgattcctggaaaagtataaagagtatcttggactggacatcttttaaccaggagagaattgttgatgttgctggaccagggggttggaatgacccagatatgttagtgattggcaactttggcctcagctggaatcagcaagtaactcagatggccctctgggctatcatggctgctcctttattcatgtctaatgacctccgacacatcagccctcaagccaaagctctccttcaggataaggacgtaattgccatcaatcaggaccccttgggcaagcaagggtaccagcttagacagggagacaactttgaagtgtgggaacgacctctctcaggcttagcctgggctgtagctatgataaaccggcaggagattggtggacctcgctcttataccatcgcagttgcttccctgggtaaaggagtggcctgtaatcctgcctgcttcatcacacagctcctccctgtgaaaaggaagctagggttctatgaagctacttcaaggttaagaagtcacataaatcccacaggcactgttttgcttcagctagaaaatacaatgcagatgtcattaaaagacttactt

SEQ ID NO: 508 - protein, 398 aa, Artificial Sequence
  variant of human alpha-galactosidase A
LDNGLARTPTMGWLHWERFMCNLDCQEEPDSCISEKLFMEMAELMVSEGWKDAGYEYLCIDDCWMAPQRDSEGRLQADPQRFPHGIRQLANYVHSKGLKLGIYADVGNKTCAGFPGSFGYYDIDAQTFADWGVDLLKFDGCYCDSLENLADGYKHMSLALNRTGRSIVYSCEWPLYMWPFQKPNYTEIRQYCNHWRNFADIDDSWKSIKSILDWTSFNQERIVDVAGPGGWNDPDMLVIGNFGLSWNQQVTQMALWAIMAAPLFMSNDLRHISPQAKALLQDKDVIAINQDPLGKQGYQLRQGDNFEVWERPLSGLAWAVAMINRQEIGGPRSYTIAVASLGKGVACNPACFITQLLPVKRKLGFYEATSRLRSHINPTGTVLLQLENTMQMSLKDLL

SEQ ID NO: 509 - DNA, 1194 bp, Artificial Sequence
  variant of human alpha-galactosidase A
ctggacaatggattggcaaggacgcctacaatgggctggctgcactgggagcgcttcatgtgcaaccttgactgccaggaagagccagattcctgcatcagtgagaagctcttcatggagatggcagagctgatggtctctgaaggctggaaggatgcaggttatgagtacctctgcattgatgactgttggatggctccccaaagagattcagaaggcagacttcaggcagaccctcagcgctttcctcatgggattcgccagctagctaatcatgttcacagcaaaggactgaagctagggatttatgcagatgttggaaataaaacctgcgcaggcttccctgggagttttggatactacgacattgatgcccagacctttgctgactggggagtagatctgctaaaatttgatggttgttactgtgacagtttggaaaatttggcagatggttataagcacatgtccttggccctgaataggactggcagaagcattgtgtactcctgtgagtggcctctttatatgtggccctttcaaaagcccaattatacagaaatccgacagtactgcaatcactggcgaaattttgctgacattgatgattcctggaagagtataaagagtatcttggactggacatctaggaaccaggagagaattgttgatgttgctggaccagggggttggaatgacccagatatgttagtgattggcaactttggcctcagctggaatcagcaagtaactcagatggccctctgggctatcatggctgctcctttattcatgtctaatgacctccgagccatcagccctcaagccaaagctctccttcaggataaggacgtaattgccatcaatcaggaccccttgggcaagcaagggtaccagcttagacagggagacaactttgaagtgtgggaacgacctctctcaggcttagcctgggctgtagctatgataaaccggcaggagattggtggacctcgctcttataccatcgcagttgcttccctgggtaaaggagtggcctgtaatcctgcctgcttcatcacacagctcctccctgtgaaaaggaagctagggttctatgaatggacttcaaggttaagaagtcacataaatcccacaggcactgttttgcttcagctagaaaatacaatgcagatgtcattaaaagacttactt

SEQ ID NO: 510 - protein, 398 aa, Artificial Sequence
  variant of human alpha-galactosidase A
LDNGLARTPTMGWLHWERFMCNLDCQEEPDSCISEKLFMEMAELMVSEGWKDAGYEYLCIDDCWMAPQRDSEGRLQADPQRFPHGIRQLANHVHSKGLKLGIYADVGNKTCAGFPGSFGYYDIDAQTFADWGVDLLKFDGCYCDSLENLADGYKHMSLALNRTGRSIVYSCEWPLYMWPFQKPNYTEIRQYCNHWRNFADIDDSWKSIKSILDWTSRNQERIVDVAGPGGWNDPDMLVIGNFGLSWNQQVTQMALWAIMAAPLFMSNDLRAISPQAKALLQDKDVIAINQDPLGKQGYQLRQGDNFEVWERPLSGLAWAVAMINRQEIGGPRSYTIAVASLGKGVACNPACFITQLLPVKRKLGFYEWTSRLRSHINPTGTVLLQLENTMQMSLKDLL

SEQ ID NO: 511 - DNA, 1194 bp, Artificial Sequence
  variant of human alpha-galactosidase A
ctggacaatggattggcaaggacgcctaccatgggctggctgcactgggagcgcttcatgtgcaaccttgactgccaggaagagccagattcctgcatcagtgagaagctcttcatggagatggcagagctgatggtctctgaaggctggaaggatgcaggttatgagtacctctgcattgatgactgttggatggctccccaaagagattcagaaggcagacttcaggcagaccctcagcgctttcctcatgggattcgccagctagctaatcatgttcacagcaaaggactgaagctagggatttatgcagatgttggaaataaaacctgcgcaggcttccctgggagttttggatactacgacattgatgcccagacctttgctgactggggagtagatctgctaaaatttgatggttgttactgtgacagtttggaaaatttggcagatggttataagcacatgtccttggccctgaataggactggcagaagcattgtgtactcctgtgagtggcctctttatatgtggccctttcaaaagcccaattatacagaaatccgacagtactgcaatcactggcgaaattttgctgacattgatgattcctggaaaagtataaagagtatcttggactggacatcttttaaccaggagagaattgttgatgttgctggaccagggggttggaatgacccagatatgttagtgattggcaactttggcctcagctggaatcagcaagtaactcagatggccctctgggctatcatggctgctcctttattcatgtctaatgacctccgagccatcagccctcaagccaaagctctccttcaggataaggacgtaattgccatcaatcaggaccccttgggcaagcaagggtaccagcttagacagggagacaactttgaagtgtgggaacgacctctctcaggcttagcctgggctgtagctatgataaaccggcaggagattggtggacctcgctcttataccatccccgttgcttccctgggtaaaggagtggcctgtaatcctgcctgcttcatcacacagctcctccctgtgaaaaggaagctagggttctatgaatggacttcaaggttaagaagtcacataaatcccacaggcactgttttgcttcagctagaaaatacaatgcagatgtcattaaaagacttactt

SEQ ID NO: 512 - protein, 398 aa, Artificial Sequence
  variant of human alpha-galactosidase A
LDNGLARTPTMGWLHWERFMCNLDCQEEPDSCISEKLFMEMAELMVSEGWKDAGYEYLCIDDCWMAPQRDSEGRLQADPQRFPHGIRQLANHVHSKGLKLGIYADVGNKTCAGFPGSFGYYDIDAQTFADWGVDLLKFDGCYCDSLENLADGYKHMSLALNRTGRSIVYSCEWPLYMWPFQKPNYTEIRQYCNHWRNFADIDDSWKSIKSILDWTSFNQERIVDVAGPGGWNDPDMLVIGNFGLSWNQQVTQMALWAIMAAPLFMSNDLRAISPQAKALLQDKDVIAINQDPLGKQGYQLRQGDNFEVWERPLSGLAWAVAMINRQEIGGPRSYTIPVASLGKGVACNPACFITQLLPVKRKLGFYEWTSRLRSHINPTGTVLLQLENTMQMSLKDLL

SEQ ID NO: 513 - DNA, 1194 bp, Artificial Sequence
  variant of human alpha-galactosidase A
ctggacaatggattggcaaggacgcctacaatgggctggctgcactgggagcgcttcatgtgcaaccttgactgccaggaagagccagattcctgcatcagtgagaagctcttcatggagatggcagagctgatggtctctgaaggctggaaggatgcaggttatgagtacctctgcattgatgactgttggatggctccccaaagagattcagaaggcagacttcaggcagaccctcagcgctttcctcatgggattcgccagctagctaatcatgttcacagcaaaggactgaagctagggatttatgcagatgttggaaataaaacctgcgcaggcttccctgggagttttggatactacgacattgatgcccagacctttgctgactggggagtagatctgctaaaatttgatggttgttactgtgacagtttggaaaatttggcagatggttataagcacatgtccttggccctgaataggactggcagaagcattgtgtactcctgtgagtggcctctttatatgtggccctttcaaaagcccaattatacagaaatccgacagtactgcaatcactggcgaaattttgctgacattgatgattcctggaagagtataaagagtatcttggactggacatctttcaaccaggagagaattgttgatgttgctggaccagggggttggaatgacccagatatgttagtgattggcaactttggcctcagctggaatcagcaagtaactcagatggccctctgggctatcatggctgctcctttattcatgtctaatgacctccgacacatcagccctcaagccaaagctctccttcaggataaggacgtaattgccatcaatcaggaccccttgggcaagcaagggtaccagcttagacagggagacaactttgaagtgtgggaacgacctctctcaggcgatgcctgggctgtagctatgataaaccggcaggagattggtggacctcgctcttataccatcgcagttgcttccctgggtaaaggagtggcctgtaatcctgcctgcttcatcacacagctcctccctgtgaaaaggaagctagggttctatgaatggacttcaaggttaagaagtcacataaatcccacaggcactgttttgcttcagctagaaaatacaatgcagatgtcattaaaagacttactt

SEQ ID NO: 514 - protein, 398 aa, Artificial Sequence
  variant of human alpha-galactosidase A
LDNGLARTPTMGWLHWERFMCNLDCQEEPDSCISEKLFMEMAELMVSEGWKDAGYEYLCIDDCWMAPQRDSEGRLQADPQRFPHGIRQLANHVHSKGLKLGIYADVGNKTCAGFPGSFGYYDIDAQTFADWGVDLLKFDGCYCDSLENLADGYKHMSLALNRTGRSIVYSCEWPLYMWPFQKPNYTEIRQYCNHWRNFADIDDSWKSIKSILDWTSFNQERIVDVAGPGGWNDPDMLVIGNFGLSWNQQVTQMALWAIMAAPLFMSNDLRHISPQAKALLQDKDVIAINQDPLGKQGYQLRQGDNFEVWERPLSGDAWAVAMINRQEIGGPRSYTIAVASLGKGVACNPACFITQLLPVKRKLGFYEWTSRLRSHINPTGTVLLQLENTMQMSLKDLL

SEQ ID NO: 515 - DNA, 1251 bp, Artificial Sequence
  variant of human alpha-galactosidase A
atggaatggagctgggtctttctcttcttcctgtcagtaacgactggtgtccactccctggacaatggattggcaaggacgcctacaatgggctggctgcactgggagcgcttcatgtgcaaccttgactgccaggaagagccagattcctgcatcagtgagaagctcttcatggagatggcagagctcatggtctcagaaggctggaaggatgcaggttatgagtacctctgcattgatgactgttggatggctccccaaagagattcagaaggcagacttcaggcagaccctcagcgctttcctcatgggattcgccagctagctaatcatgttcacagcaaaggactgaagctagggatttatgcagatgttggaaataaaacctgcgcaggcttccctgggagttttggatactacgacattgatgcccagacctttgctgactggggagtagatctgctaaaatttgatggttgttactgtgacagtttggaaaatttggcagatggttataagcacatgtccttggccctgaataggactggcagaagcattgtgtactcctgtgagtggcctctttatatgtggccctttcaaaagcccaattatacagaaatccgacagtactgcaatcactggcgaaattttgctgacattgatgattcctggaagagtataaagagtatcttggactggacatcttttaaccaggagagaattgttgatgttgctggaccagggggttggaatgacccagatatgttagtgattggcaactttggcctcagctgggaccagcaagtaactcagatggccctctgggctatcatggctgctcctttattcatgtctaatgacctccgacacatcagccctcaagccaaagctctccttcaggataaggacgtaattgccatcaatcaggaccccttgggcaagcaagggtaccagcttagacagggagacaactttgaagtgtgggaacgacctctctcaggcttagcctgggctgtagctatgataaaccggcaggagattggtggacctcgctcttataccatcgccgttgcttccctgggtaaaggagtggcctgtaatcctgcctgcttcatcacacagctcctccctgtgaaaaggaagctagggttctatgaatggacttcaaggttaagaagtcacataaatcccacaggcactgttttgcttcagctagaaaatacaatgcagatgtcattaaaagacttactt

SEQ ID NO: 516 - protein, 417 aa, Artificial Sequence
  variant of human alpha-galactosidase A
MEWSWVFLFFLSVTTGVHSLDNGLARTPTMGWLHWERFMCNLDCQEEPDSCISEKLFMEMAELMVSEGWKDAGYEYLCIDDCWMAPQRDSEGRLQADPQRFPHGIRQLANHVHSKGLKLGIYADVGNKTCAGFPGSFGYYDIDAQTFADWGVDLLKFDGCYCDSLENLADGYKHMSLALNRTGRSIVYSCEWPLYMWPFQKPNYTEIRQYCNHWRNFADIDDSWKSIKSILDWTSFNQERIVDVAGPGGWNDPDMLVIGNFGLSWDQQVTQMALWAIMAAPLFMSNDLRHISPQAKALLQDKDVIAINQDPLGKQGYQLRQGDNFEVWERPLSGLAWAVAMINRQEIGGPRSYTIAVASLGKGVACNPACFITQLLPVKRKLGFYEWTSRLRSHINPTGTVLLQLENTMQMSLKDLL

SEQ ID NO: 517 - DNA, 1194 bp, Artificial Sequence
  variant of human alpha-galactosidase A
ctggacaatggattggcaaggacgcctacaatgggctggctgcactgggagcgcttcatgtgcaaccttgactgccaggaagagccagattcctgcatcagtgagaagctcttcatggagatggcagagctgatggtctctgaaggctggaaggatgcaggttatgagtacctctgcattgatgactgttggatggctccccaaagagattcagaaggcagacttcaggcagaccctcagcgctttcctcatgggattcgccagctagctaatcatgttcacagcaaaggactgaagctagggatttatgcagatgttggaaataaaacctgcgcaggcttccctgggagttttggatactacgacattgatgcccagacctttgctgactggggagtagatctgctaaaatttgatggttgttactgtgacagtttggaaaatttggcagatggttataagcacatgtccttggccctgaataggactggcagaagcattgtgtactcctgtgagtggcctctttatatgtggccctttcaaaagcccaattatacagaaatccgacagtactgcaatcactggcgaaattttgctgacattgatgattcctggaaaagtataaagagtatcttggactggacatctttcaaccaggagagaattgttgatgttgctggaccagggggttggaatgacccagatatgttagtgattggcaactttggcctcagctgggaccagcaagtaactcagatggccctctgggctatcatggctgctcctttattcatgtctaatgacctccgagccatcagccctcaagccaaagctctccttcaggataaggacgtaattgccatcaatcaggaccccttgggcaagcaagggtaccagcttagacagggagacaactttgaagtgtgggaacgacctctctcaggcctcgcctgggctgtagctattataaaccggcaggagattggtggacctcgctcttataccatcgcagttgcttccctgggtaaaggagtggcctgtaatcctgcctgcttcatcacacagctcctccctgtgaaaaggaagctagggttctatgaatggacttcaaggttaagaagtcacataaatcccacaggcactgttttgcttcagctagaaaatacaatgcagatgtcattaaaagacttactt

SEQ ID NO: 518 - protein, 398 aa, Artificial Sequence
  variant of human alpha-galactosidase A
LDNGLARTPTMGWLHWERFMCNLDCQEEPDSCISEKLFMEMAELMVSEGWKDAGYEYLCIDDCWMAPQRDSEGRLQADPQRFPHGIRQLANHVHSKGLKLGIYADVGNKTCAGFPGSFGYYDIDAQTFADWGVDLLKFDGCYCDSLENLADGYKHMSLALNRTGRSIVYSCEWPLYMWPFQKPNYTEIRQYCNHWRNFADIDDSWKSIKSILDWTSFNQERIVDVAGPGGWNDPDMLVIGNFGLSWDQQVTQMALWAIMAAPLFMSNDLRAISPQAKALLQDKDVIAINQDPLGKQGYQLRQGDNFEVWERPLSGLAWAVAIINRQEIGGPRSYTIAVASLGKGVACNPACFITQLLPVKRKLGFYEWTSRLRSHINPTGTVLLQLENTMQMSLKDLL

SEQ ID NO: 519 - DNA, 1251 bp, Artificial Sequence
  variant of human alpha-galactosidase A
atggaatggagctgggtctttctcttcttcctgtcagtaacgactggtgtccactccctggacaatggattggcaaggacgcctacaatgggctggctgcactgggagcgcttcatgtgcaaccttgactgccaggaagagccagattcctgcatcagtgagaagctcttcatggagatggcagagctcatggtctcagaaggctggaaggatgcaggttatgagtacctctgcattgatgactgttggatggctccccaaagagattcagaaggcagacttcaggcagaccctcagcgctttcctcatgggattcgccagctagctaatcatgttcacagcaaaggactgaagctagggatttatgcagatgttggaaataaaacctgcgcaggcttccctgggagttttggatactacgacattgatgcccagacctttgctgactggggagtagatctgctaaaatttgatggttgttactgtgacagtttggaaaatttggcagatggttataagcacatgtccttggccctgaataggactggcagaagcattgtgtactcctgtgagtggcctctttatatgtggccctttcaaaagcccaattatacagaaatccgacagtactgcaatcactggcgaaattttgctgacattgatgattcctggaaaagtataaagagtatcttggactggacatcttttaaccaggagagaattgttgatgttgctggaccagggggttggaatgacccagatatgttagtgattggcaactttggcctcagctgggaccagcaagtaactcagatggccctctgggctatcatggctgctcctttattcatgtctaatgacctccgacacatcagccctcaagccaaagctctccttcaggataaggacgtaattgccatcaatcaggaccccttgggcaagcaagggtaccagcttagaaagggagacaactttgaagtgtgggaacgacctctctcaggcttagcctgggctgtagctattataaaccggcaggagattggtggacctcgctcttataccatccccgttgcttccctgggtaaaggagtggcctgtaatcctgcctgcttcatcacacagctcctccctgtgaaaaggaagctagggttctatgaatggacttcaaggttaagaagtcacataaatcccacaggcactgttttgcttcagctagaaaatacaatgcagatgtcattaaaagacttactt

SEQ ID NO: 520 - protein, 417 aa, Artificial Sequence
  variant of human alpha-galactosidase A
MEWSWVFLFFLSVTTGVHSLDNGLARTPTMGWLHWERFMCNLDCQEEPDSCISEKLFMEMAELMVSEGWKDAGYEYLCIDDCWMAPQRDSEGRLQADPQRFPHGIRQLANHVHSKGLKLGIYADVGNKTCAGFPGSFGYYDIDAQTFADWGVDLLKFDGCYCDSLENLADGYKHMSLALNRTGRSIVYSCEWPLYMWPFQKPNYTEIRQYCNHWRNFADIDDSWKSIKSILDWTSFNQERIVDVAGPGGWNDPDMLVIGNFGLSWDQQVTQMALWAIMAAPLFMSNDLRHISPQAKALLQDKDVIAINQDPLGKQGYQLRKGDNFEVWERPLSGLAWAVAIINRQEIGGPRSYTIPVASLGKGVACNPACFITQLLPVKRKLGFYEWTSRLRSHINPTGTVLLQLENTMQMSLKDLL

SEQ ID NO: 521 - DNA, 1194 bp, Artificial Sequence
  variant of human alpha-galactosidase A
ctggacaatggattggcaaggacgcctacaatgggctggctgcactgggagcgcttcatgtgcaaccttgactgccaggaagagccagattcctgcatcagtgagaagctcttcatggagatggcagagctcatggtctcagaaggctggaaggatgcaggttatgagtacctctgcattgatgactgttggatggctccccaaagagattcagaaggcagacttcaggcagaccctcagcgctttcctcatgggattcgccagctagctaatcatgttcacagcaaaggactgaagctagggatttatgcagatgttggaaataaaacctgcgcaggcttccctgggagttttggatactacgacattgatgcccagacctttgctgactggggagtagatctgctaaaatttgatggttgttactgtgacagtttggaaaatttggcagatggttataagcacatgtccttggccctgaataggactggcagaagcattgtgtactcctgtgagtggcctctttatatgtggccctttcaaaagcccaattatacagaaatccgacagtactgcaatcactggcgaaattttgctgacattgatgattcctggaaaagtataaagagtatcttggactggacatctttcaaccaggagagaattgttgatgttgctggaccagggggttggaatgacccagatatgttagtgattggcaactttggcctcagctggaaccagcaagtaactcagatggccctctgggctatcatggctgctcctttattcatgtctaatgacctccgacacatcagccctcaagccaaagctctccttcaggataaggacgtaattgccatcaatcaggaccccttgggcaagcaagggtaccagcttagaaagggagacaactttgaagtgtgggaacgacctctctcaggcctcgcctgggctgtagctatgataaaccggcaggagattggtggacctcgctcttataccatcgcagttgcttccctgggtaaaggagtggcctgtaatcctgcctgcttcatcacacagctcctccctgtgaaaaggaagctagggttctatgaatggacttcaaggttaagaagtcacataaatcccacaggcactgttttgcttcagctagaaaatacaatgcagatgtcattaaaagacttactt

SEQ ID NO: 522 - protein, 398 aa, Artificial Sequence
  variant of human alpha-galactosidase A
LDNGLARTPTMGWLHWERFMCNLDCQEEPDSCISEKLFMEMAELMVSEGWKDAGYEYLCIDDCWMAPQRDSEGRLQADPQRFPHGIRQLANHVHSKGLKLGIYADVGNKTCAGFPGSFGYYDIDAQTFADWGVDLLKFDGCYCDSLENLADGYKHMSLALNRTGRSIVYSCEWPLYMWPFQKPNYTEIRQYCNHWRNFADIDDSWKSIKSILDWTSFNQERIVDVAGPGGWNDPDMLVIGNFGLSWNQQVTQMALWAIMAAPLFMSNDLRHISPQAKALLQDKDVIAINQDPLGKQGYQLRKGDNFEVWERPLSGLAWAVAMINRQEIGGPRSYTIAVASLGKGVACNPACFITQLLPVKRKLGFYEWTSRLRSHINPTGTVLLQLENTMQMSLKDLL

SEQ ID NO: 523 - DNA, 1194 bp, Artificial Sequence
  variant of human alpha-galactosidase A
ctggataatggattggctagaacacctaccatggggtggcttcactgggagaggttcatgtgcaacctggactgtcaggaagaaccagacagctgcatctccgagaagctctttatggaaatggccgaactgatggtgtccgagggctggaaagatgcaggttacgagtatctgtgtattgacgattgctggatggccccacaacgggattctgagggaagacttcaggctgatccgcagcgcttccctcatggcataaggcagctggcaaaccacgtccacagtaaggggctcaaattgggaatctacgcggacgtgggcaataagacctgtgccggttttccgggatcattcgggtattatgacattgacgcccaaacgtttgctgattggggcgttgacctgctgaaattcgatggttgctactgtgacagcctcgaaaacctggcagacggctacaagcatatgtctctcgccctgaatagaaccggtcggccaatcgtatattcctgcgagtggcctctttacatgtggccatttcagaaaccgaactacacagaaattcgccagtattgcaatcattggaggaacttcgctgatatcgatgactcatgggcctccataaagagcatcttggactggaccagtcggaatcaggagcgaattgtggatgtcgcaggccctggaggatggaacgatccagacatgctggtgatcggcaattttggcctctcttgggaccagcaggttacccaaatggctctgtgggcaattatggccggtcctcttttcatgagcaacgatctgcgcgcgatctcaccacaggcaaaggccctgctccaagacaaagatgtgatagccatcaatcaggacccgttgggaaagcagggctaccagctgagaaaaggcgacaactttgaggtctgggaaaggcctttgagtggagatgcgtgggctgtggccattattaatcggcaagagatcggaggtccacgctcctatacaattgctgtagcatctcttggcaagggcgttgcctgtaacccagcttgcttcatcactcagcttctgccggtgaagagaaaactgggtttctacgaagctaccagcaggctccgatcccacatcaaccctacaggaaccgtcctcttgcagctggagaatacgatgcagacttcactgaaggacctcctg

SEQ ID NO: 524 - protein, 398 aa, Artificial Sequence
  variant of human alpha-galactosidase A
LDNGLARTPTMGWLHWERFMCNLDCQEEPDSCISEKLFMEMAELMVSEGWKDAGYEYLCIDDCWMAPQRDSEGRLQADPQRFPHGIRQLANHVHSKGLKLGIYADVGNKTCAGFPGSFGYYDIDAQTFADWGVDLLKFDGCYCDSLENLADGYKHMSLALNRTGRPIVYSCEWPLYMWPFQKPNYTEIRQYCNHWRNFADIDDSWASIKSILDWTSRNQERIVDVAGPGGWNDPDMLVIGNFGLSWDQQVTQMALWAIMAGPLFMSNDLRAISPQAKALLQDKDVIAINQDPLGKQGYQLRKGDNFEVWERPLSGDAWAVAIINRQEIGGPRSYTIAVASLGKGVACNPACFITQLLPVKRKLGFYEATSRLRSHINPTGTVLLQLENTMQTSLKDLL

SEQ ID NO: 525 - DNA, 1194 bp, Artificial Sequence
  variant of human alpha-galactosidase A
ctggataatggattggctagaacacctaccatggggtggcttcactgggagaggttcatgtgcaacctggactgtcaggaagaaccagacagctgcatctccgagaagctctttgaggaaatggccgaactgatggtgaccgagggctggaaagatgcaggttacgagtatctgtgtattgacgattgctggatggccccacaacgggattctgagggaagacttcaggctgatccgcagcgcttccctcatggcataaggcagctggcaaactacgtccacagtaaggggctcaaattgggaatctacgcggacgtgggcaataagacctgtgccggttttccgggatcattcgggtattatgacattgacgcccaaacgtttgctgattggggcgttgacctgctgaaattcgatggttgctactgtgacagcctcgaaaacctggcagacggctacaagcatatgtctctcgccctgaatagaaccggtcggccaatcgtatattcctgcgagtggcctctttacatgtggccatttcagaaaccgaactacacagaaattcgccagtattgcaatcattggaggaacttcgctgatatcgatgactcatgggcctccataaagagcatcttggactggaccagtcggaatcaggagcgaattgtggatgtcgcaggccctggaggatggaacgatccagacatgctggtgatcggcaattttggcctctcttgggaccagcaggttacccaaatggctctgtgggcaattatggccggtcctcttttcatgagcaacgatctgcgcgctatctcaccacaggcaaaggccctgctccaagacaaagatgtgatagccatcaatcaggacccgttgggaaagcagggctaccagctgagaaaaggcgacaactttgaggtctgggaaaggcctttgagtggagatgcgtgggctgtggccattattaatcggcaagagatcggaggtccacgctcctatacaattcctgtagcatctcttggcaagggcgttgcctgtaacccagcttgcttcatcactcagcttctgccggtgaagagaaaactgggtttctacgaagctaccagcaggctccgatcccacatcaaccctacaggaaccgtcctcttgcagctggagaatacgatgcagacttcactgaaggacctcctg

SEQ ID NO: 526 - protein, 398 aa, Artificial Sequence
  variant of human alpha-galactosidase A
LDNGLARTPTMGWLHWERFMCNLDCQEEPDSCISEKLFEEMAELMVTEGWKDAGYEYLCIDDCWMAPQRDSEGRLQADPQRFPHGIRQLANYVHSKGLKLGIYADVGNKTCAGFPGSFGYYDIDAQTFADWGVDLLKFDGCYCDSLENLADGYKHMSLALNRTGRPIVYSCEWPLYMWPFQKPNYTEIRQYCNHWRNFADIDDSWASIKSILDWTSRNQERIVDVAGPGGWNDPDMLVIGNFGLSWDQQVTQMALWAIMAGPLFMSNDLRAISPQAKALLQDKDVIAINQDPLGKQGYQLRKGDNFEVWERPLSGDAWAVAIINRQEIGGPRSYTIPVASLGKGVACNPACFITQLLPVKRKLGFYEATSRLRSHINPTGTVLLQLENTMQTSLKDLL

SEQ ID NO: 527 - DNA, 1194 bp, Artificial Sequence
  variant of human alpha-galactosidase A
ctggataatggattggctagaacacctcctatggggtggcttcactgggagaggttcatgtgcaacctggactgtcaggaagaaccagacagctgcatctccgagaagctctttgaagaaatggccgaactgatggtgtccgagggctggaaagatgcaggttacgagtatctgtgtattgacgattgctggatggccccacaacgggattctgagggaagacttcaggctgatccgcagcgcttccctcatggcataaggcagctggcaaaccacgtccacagtaaggggctcaaattgggaatctacgcggacgtgggcaataagacctgtgccggttttccgggatcattcgggtattatgacattgacgcccaaacgtttgctgattggggcgttgacctgctgaaattcgatggttgctactgtgacagcctcgaaaacctggcagacggctacaagcatatgtctctcgccctgaatagaaccggtcggtcaatcgtatattcctgcgagtggcctctttacatgtggccatttcagaaaccgaactacacagaaattcgccagtattgcaatcattggaggaacttcgctgatatcgatgactcatgggcctccataaagagcatcttggactggaccagtcggaatcaggagcgaattgtggatgtcgcaggccctggaggatggaacgatccagacatgctggtgatcggcaattttggcctctcttgggaccagcaggttacccaaatggctctgtgggcaattatggccggccctcttttcatgagcaacgatctgcgcgcgatctcaccacaggcaaaggccctgctccaagacaaagatgtgatagccatcaatcaggacccgttgggaaagcagggctaccagctgagaaaaggcgacaactttgaggtctgggaaaggcctttgagtggagatgcgtgggctgtggccattattaatcggcaagagatcggaggtccacgctcctatacaattcctgtagcatctcttggcaagggcgttgcctgtaacccagcttgcttcatcactcagcttctgccggtgaagagaaaactgggtttctacgaagctaccagcaggctccgatcccacatcaaccctacaggaaccgtcctcttgcagctggagaatacgatgcagacctcactgaaggacctcctg

SEQ ID NO: 528 - protein, 398 aa, Artificial Sequence
  variant of human alpha-galactosidase A
LDNGLARTPPMGWLHWERFMCNLDCQEEPDSCISEKLFEEMAELMVSEGWKDAGYEYLCIDDCWMAPQRDSEGRLQADPQRFPHGIRQLANHVHSKGLKLGIYADVGNKTCAGFPGSFGYYDIDAQTFADWGVDLLKFDGCYCDSLENLADGYKHMSLALNRTGRSIVYSCEWPLYMWPFQKPNYTEIRQYCNHWRNFADIDDSWASIKSILDWTSRNQERIVDVAGPGGWNDPDMLVIGNFGLSWDQQVTQMALWAIMAGPLFMSNDLRAISPQAKALLQDKDVIAINQDPLGKQGYQLRKGDNFEVWERPLSGDAWAVAIINRQEIGGPRSYTIPVASLGKGVACNPACFITQLLPVKRKLGFYEATSRLRSHINPTGTVLLQLENTMQTSLKDLL

SEQ ID NO: 529 - DNA, 1194 bp, Artificial Sequence
  variant of human alpha-galactosidase A
ctggataatggattggctagaacacctcccatggggtggcttcactgggagaggttcatgtgcaacctggactgtcaggaagaaccagacagctgcatctccgagaagctctttgaggaaatggccgaacgaatggtgactgagggctggaaagatgcaggttacgagtatctgtgtattgacgattgctggatggccccacaacgggattctgagggaagacttcaggctgatccgcagcgcttccctcatggcataaggcagctggcaaaccacgtccacagtaaggggctcaaattgggaatctacgcggacgtgggcaataagacctgtgccggttttccgggatcattcgggtattatgacattgacgcccaaacgtttgctgattggggcgttgacctgctgaaattcgatggttgctactgtgacagcctcgaaaacctggcagacggctacaagcatatgtctctcgccctgaatagaaccggtcggccaatcgtatattcctgcgagtggcctctttacatgtggccatttcagaaaccgaactacacagaaattcgccagtattgcaatcattggaggaacttcgctgatatcgatgactcatggaagtccataaagagcatcttggactggaccagttttaatcaggagcgaattgtggatgtcgcaggccctggaggatggaacgatccagacatgctggtgatcggcaattttggcctctcttgggaccagcaggttacccaaatggctctgtgggcaattatggccggccctcttttcatgagcaacgatctgcgcgcgatctcaccacaggcaaaggccctgctccaagacaaagatgtgatagccatcaatcaggacccgttgggaaagcagggctaccagctgagaaaaggcgacaactttgaggtctgggaaaggcctttgagtggagatgcgtgggctgtggccataattaatcggcaagagatcggaggtccacgctcctatacaattcctgtagcatctcttggcaagggcgttgcctgtaacccagcttgcttcatcactcagcttctgccggtgaagagaaaactgggtttctacgaagctaccagcaggctccgatcccacatcaaccctacaggaaccgtcctcttgcagctggagaatacgatgcagacttcactgaaggacctcctg

SEQ ID NO: 530 - protein, 398 aa, Artificial Sequence
  variant of human alpha-galactosidase A
LDNGLARTPPMGWLHWERFMCNLDCQEEPDSCISEKLFEEMAERMVTEGWKDAGYEYLCIDDCWMAPQRDSEGRLQADPQRFPHGIRQLANHVHSKGLKLGIYADVGNKTCAGFPGSFGYYDIDAQTFADWGVDLLKFDGCYCDSLENLADGYKHMSLALNRTGRPIVYSCEWPLYMWPFQKPNYTEIRQYCNHWRNFADIDDSWKSIKSILDWTSFNQERIVDVAGPGGWNDPDMLVIGNFGLSWDQQVTQMALWAIMAGPLFMSNDLRAISPQAKALLQDKDVIAINQDPLGKQGYQLRKGDNFEVWERPLSGDAWAVAIINRQEIGGPRSYTIPVASLGKGVACNPACFITQLLPVKRKLGFYEATSRLRSHINPTGTVLLQLENTMQTSLKDLL

SEQ ID NO: 531 - DNA, 1194 bp, Artificial Sequence
  variant of human alpha-galactosidase A
ctggataatggattggctagaacacctcctatggggtggcttcactgggagaggttcatgtgcaacctggactgtcaggaagaaccagacagctgcatctccgagaagctctttatggaaatggccgaacggatggtgtccgagggctggaaagatgcaggttacgagtatctgtgtattgacgattgctggatggccccacaacgggattctgagggaagacttcaggctgatccgcagcgcttccctcatggcataaggcagctggcaaactacgtccacagtaaggggctcaaattgggaatctacgcggacgtgggcaataagacctgtgccggttttccgggatcattcgggtattatgacattgacgcccaaacgtttgctgattggggcgttgacctgctgaaattcgatggttgctactgtgacagcctcgaaaacctggcagacggctacaagcatatgtctctcgccctgaatagaaccggtcggccaatcgtatattcctgcgagtggcctctttacatgtggccatttcagaaaccgaactacacagaaattcgccagtattgcaatcattggaggaacttcgctgatatcgatgactcatgggcctccataaagagcatcttggactggaccagtcggaatcaggagcgaattgtggatgtcgcaggccctggaggatggaacgatccagacatgctggtgatcggcaattttggcctctcttgggatcagcaggttacccaaatggctctgtgggcaattatggccggccctcttttcatgagcaacgatctgcgcgctatctcaccacaggcaaaggccctgctccaagacaaagatgtgatagccatcaatcaggacccgttgggaaagcagggctaccagctgagaaaaggcgacaactttgaggtctgggaaaggcctttgagtggagatgcgtgggctgtggccataattaatcggcaagagatcggaggtccacgctcctatacaattcctgtagcatctcttggcaagggcgttgcctgtaacccagcttgcttcatcactcagcttctgccggtgaagagaaaactgggtttctacgaagcaaccagcaggctccgatcccacatcaaccctacaggaaccgtcctcttgcagctggagaatacgatgcagatgtcactgaaggacctcctg

SEQ ID NO: 532 - protein, 398 aa, Artificial Sequence
  variant of human alpha-galactosidase A
LDNGLARTPPMGWLHWERFMCNLDCQEEPDSCISEKLFMEMAERMVSEGWKDAGYEYLCIDDCWMAPQRDSEGRLQADPQRFPHGIRQLANYVHSKGLKLGIYADVGNKTCAGFPGSFGYYDIDAQTFADWGVDLLKFDGCYCDSLENLADGYKHMSLALNRTGRPIVYSCEWPLYMWPFQKPNYTEIRQYCNHWRNFADIDDSWASIKSILDWTSRNQERIVDVAGPGGWNDPDMLVIGNFGLSWDQQVTQMALWAIMAGPLFMSNDLRAISPQAKALLQDKDVIAINQDPLGKQGYQLRKGDNFEVWERPLSGDAWAVAIINRQEIGGPRSYTIPVASLGKGVACNPACFITQLLPVKRKLGFYEATSRLRSHINPTGTVLLQLENTMQMSLKDLL

SEQ ID NO: 533 - DNA, 1194 bp, Artificial Sequence
  variant of human alpha-galactosidase A
ctggataatggattggctagaacacctaccatggggtggcttcactgggagaggttcatgtgcaacctggactgtcaggaagaaccagacagctgcatctccgagaagctctttatggaaatggccgaacggatggtgaccgagggctggaaagatgcaggttacgagtatctgtgtattgacgattgctggatggccccacaacgggattctgagggaagacttcaggctgatccgcagcgcttccctcatggcataaggcagctggcaaactacgtccacagtaaggggctcaaattgggaatctacgcggacgtgggcaataagacctgtgccggttttccgggatcattcgggtattatgacattgacgcccaaacgtttgctgatgggggcgttgacctgctgaaattcgatggttgctactgtgacagcctcgaaaacctggcagacggctacaagcatatgtctctcgccctgaatagaaccggtcggtcaatcgtatattcctgcgagtggcctctttacatgtggccatttcaaaaaccgaactacacagaaattcgccagtattgcaatcattggaggaacttcgctgatatcgatgactcatgggcctccataaagagcatcttggactggaccagtcggaatcaggagcgaattgtggatgtcgcaggccctggaggatggaacgatccagacatgctggtgatcggcaattttggcctctcttgggaccagcaggttacccaaatggctctgtgggcaattatggccggccctcttttcatgagcaacgatctgcgccatatctcaccacaggcaaaggccctgctccaagacaaagatgtgatagccatcaatcaggacccgttgggaaagcagggctaccagctgagaaaaggcgacaactttgaggtctgggaaaggcctttgagtggactcgcgtgggctgtggccatgattaatcggcaagagatcggaggtccacgctcctatacaattcctgtagcatctcttggcaagggcgttgcctgtaacccagcttgcttcatcactcagcttctgccggtgaagagaaaactgggtttctacgaagcaaccagcaggctccgatcccacatcaaccctacaggaaccgtcctcttgcagctggagaatacgatgcagacctcactgaaggacctcctg

SEQ ID NO: 534 - protein, 398 aa, Artificial Sequence
  variant of human alpha-galactosidase A
LDNGLARTPTMGWLHWERFMCNLDCQEEPDSCISEKLFMEMAERMVTEGWKDAGYEYLCIDDCWMAPQRDSEGRLQADPQRFPHGIRQLANYVHSKGLKLGIYADVGNKTCAGFPGSFGYYDIDAQTFADGGVDLLKFDGCYCDSLENLADGYKHMSLALNRTGRSIVYSCEWPLYMWPFQKPNYTEIRQYCNHWRNFADIDDSWASIKSILDWTSRNQERIVDVAGPGGWNDPDMLVIGNFGLSWDQQVTQMALWAIMAGPLFMSNDLRHISPQAKALLQDKDVIAINQDPLGKQGYQLRKGDNFEVWERPLSGLAWAVAMINRQEIGGPRSYTIPVASLGKGVACNPACFITQLLPVKRKLGFYEATSRLRSHINPTGTVLLQLENTMQTSLKDLL

SEQ ID NO: 535 - DNA, 1194 bp, Artificial Sequence
  variant of human alpha-galactosidase A
ctggataatggattggctagaacacctcctatggggtggcttcactgggagaggttcatgtgcaacctggactgtcaggaagaaccagacagctgcatctccgagaagctctttatggaaatggccgaacggatggtgtccgagggctggaaagatgcaggttacgagtatctgtgtattgacgattgctggatggccccacaacgggattctgagggaagacttcaggctgatccgcagcgcttccctcatggcataaggcagctggcaaaccacgtccacagtaaggggctcaaattgggaatctacgcggacgtgggcaataagacctgtgccggttttccgggatcattcgggtattatgacattgacgcccaaacgtttgctgattggggcgttgacctgctgaaattcgatggttgctactgtgacagcctcgaaaacctggcagacggctacaagcatatgtctctcgccctgaatagaaccggtcggccaatcgtatattcctgcgagtggcctctttacatgtggccatttcagaaaccgaactacacagaaattcgccagtattgcaatcattggaggaacttcgctgatatcgatgactcatgggcctccataaagagcatcttggactggaccagttttaatcaggagcgaattgtggatgtcgcaggccctggaggatggaacgatccagacatgctggtgatcggcaattttggcctctcttggaatcagcaggttacccaaatggctctgtgggcaattatggccggccctcttttcatgagcaacgatctgcgcgcgatctcaccacaggcaaaggccctgctccaagacaaagatgtgatagccatcaatcaggacccgttgggaaagcagggctaccagctgagaaagggcgacaactttgaggtctgggaaaggcctttgagtggagatgcgtgggctgtggccattattaatcggcaagagatcggaggtccacgctcctatacaattcctgtagcatctcttggcaagggcgttgcctgtaacccagcttgcttcatcactcagcttctgccggtgaagagaaaactgggtttctacgaatggaccagcaggctccgatcccacatcaaccctacaggaaccgtcctcttgcagctggagaatacgatgcagacttcactgaaggacctcctg

SEQ ID NO: 536 - protein, 398 aa, Artificial Sequence
  variant of human alpha-galactosidase A
LDNGLARTPPMGWLHWERFMCNLDCQEEPDSCISEKLFMEMAERMVSEGWKDAGYEYLCIDDCWMAPQRDSEGRLQADPQRFPHGIRQLANHVHSKGLKLGIYADVGNKTCAGFPGSFGYYDIDAQTFADWGVDLLKFDGCYCDSLENLADGYKHMSLALNRTGRPIVYSCEWPLYMWPFQKPNYTEIRQYCNHWRNFADIDDSWASIKSILDWTSFNQERIVDVAGPGGWNDPDMLVIGNFGLSWNQQVTQMALWAIMAGPLFMSNDLRAISPQAKALLQDKDVIAINQDPLGKQGYQLRKGDNFEVWERPLSGDAWAVAIINRQEIGGPRSYTIPVASLGKGVACNPACFITQLLPVKRKLGFYEWTSRLRSHINPTGTVLLQLENTMQTSLKDLL

SEQ ID NO: 537 - DNA, 1194 bp, Artificial Sequence
  variant of human alpha-galactosidase A
ctggataatggattggctagaacacctcccatggggtggcttcactgggagaggttcatgtgcaacctggactgtcaggaagaaccagacagctgcatctccgagaagctctttgaggaaatggccgaacggatggtgaccgagggctggaaagatgcaggttacgagtatctgtgtattgacgattgctggatggccccacaacgggattctgagggaagacttcaggctgatccgcagcgcttccctcatggcataaggcagctggcaaactacgtccacagtaaggggctcaaattgggaatctacgcggacgtgggcaataagacctgtgccggttttccgggatcattcgggtattatgacattgacgcccaaacgtttgctgattggggcgttgacctgctgaaattcgatggttgctactgtgacagcctcgaaaacctggcagacggctacaagcatatgtctctcgccctgaatagaaccggtcggtcaatcgtatattcctgcgagtggcctctttacatgtggccatttcagaaaccgaactacacagaaattcgccagtattgcaatcattggaggaacttcgctgatatcgatgactcatgggcctccataaagagcatcttggactggaccagtcggaatcaggagcgaattgtggatgtcgcaggccctggaggatggaacgatccagacatgctggtgatcggcaattttggcctctcttggaatcagcaggttacccaaatggctctgtgggcaattatggccggtcctcttttcatgagcaacgatctgcgcgcgatctcaccacaggcaaaggccctgctccaagacaaagatgtgatagccatcaatcaggacccgttgggaaagcagggctaccagctgagaaagggcgacaactttgaggtctgggaaaggcctttgagtggagatgcgtgggctgtggccattattaatcggcaagagatcggaggtccacgctcctatacaattcctgtagcatctcttggcaagggcgttgcctgtaacccagcttgcttcatcactcagcttctgccggtgaagagaaaactgggtttctacgaagcaaccagcaggctccgatcccacatcaaccctacaggaaccgtcctcttgcagctggagaatacgatgcagacctcactgaaggacctcctg

SEQ ID NO: 538 - protein, 398 aa, Artificial Sequence
  variant of human alpha-galactosidase A
LDNGLARTPPMGWLHWERFMCNLDCQEEPDSCISEKLFEEMAERMVTEGWKDAGYEYLCIDDCWMAPQRDSEGRLQADPQRFPHGIRQLANYVHSKGLKLGIYADVGNKTCAGFPGSFGYYDIDAQTFADWGVDLLKFDGCYCDSLENLADGYKHMSLALNRTGRSIVYSCEWPLYMWPFQKPNYTEIRQYCNHWRNFADIDDSWASIKSILDWTSRNQERIVDVAGPGGWNDPDMLVIGNFGLSWNQQVTQMALWAIMAGPLFMSNDLRAISPQAKALLQDKDVIAINQDPLGKQGYQLRKGDNFEVWERPLSGDAWAVAIINRQEIGGPRSYTIPVASLGKGVACNPACFITQLLPVKRKLGFYEATSRLRSHINPTGTVLLQLENTMQTSLKDLL

SEQ ID NO: 539 - DNA, 1194 bp, Artificial Sequence
  variant of human alpha-galactosidase A
ctggataatggattggctagaacacctcctatggggtggcttcactgggagaggttcatgtgcaacctggactgtcaggaagaaccagacagctgcatctccgagaagctctttgaggaaatggccgaacgaatggtgactgagggctggaaagatgcaggttacgagtatctgtgtattgacgattgctggatggccccacaacgggattctgagggaagacttcaggctgatccgcagcgcttccctcatggcataaggcagctggcaaactacgtccacagtaaggggctcaaattgggaatctacgcggacgtgggcaataagacctgtgccggttttccgggatcattcgggtattatgacattgacgcccaaacgtttgctgattggggcgttgacctgctgaaattcgatggttgctactgtgacagcctcgaaaacctggcagacggctacaagcatatgtctctcgccctgaatagaaccggtcggccaatcgtatattcctgcgagtggcctctttacatgtggccatttcagaaaccgaactacacagaaattcgccagtattgcaatcattggaggaacttcgctgatatcgatgactcatgggcctccataaagagcatcttggactggaccagttttaatcaggagcgaattgtggatgtcgcaggccctggaggatggaacgatccagacatgctggtgatcggcaattttggcctctcttgggaccagcaggttacccaaatggctctgtgggcaattatggccggccctcttttcatgagcaacgatctgcgcgcgatctcaccacaggcaaaggccctgctccaagacaaagatgtgatagccatcaatcaggacccgttgggaaagcagggctaccagctgagaaagggcgacaactttgaggtctgggaaaggcctttgagtggagatgcgtgggctgtggccattattaatcggcaagagatcggaggtccacgctcctatacaattcctgtagcatctcttggcaagggcgttgcctgtaacccagcttgcttcatcactcagcttctgccggtgaagagaaaactgggtttctacgaagcaaccagcaggctccgatcccacatcaaccctacaggaaccgtcctcttgcagctggagaatacgatgcagacttcactgaaggacctcctg

SEQ ID NO: 540 - protein, 398 aa, Artificial Sequence
  variant of human alpha-galactosidase A
LDNGLARTPPMGWLHWERFMCNLDCQEEPDSCISEKLFEEMAERMVTEGWKDAGYEYLCIDDCWMAPQRDSEGRLQADPQRFPHGIRQLANYVHSKGLKLGIYADVGNKTCAGFPGSFGYYDIDAQTFADWGVDLLKFDGCYCDSLENLADGYKHMSLALNRTGRPIVYSCEWPLYMWPFQKPNYTEIRQYCNHWRNFADIDDSWASIKSILDWTSFNQERIVDVAGPGGWNDPDMLVIGNFGLSWDQQVTQMALWAIMAGPLFMSNDLRAISPQAKALLQDKDVIAINQDPLGKQGYQLRKGDNFEVWERPLSGDAWAVAIINRQEIGGPRSYTIPVASLGKGVACNPACFITQLLPVKRKLGFYEATSRLRSHINPTGTVLLQLENTMQTSLKDLL

SEQ ID NO: 541 - DNA, 1194 bp, Artificial Sequence
  variant of human alpha-galactosidase A
ctggataatggattggctagaacacctaccatggggtggcttcactgggagaggttcatgtgcaacctggactgtcaggaagaaccagacagctgcatctccgagaagctctttgaggaaatggccgaacggatggtgactgagggctggaaagatgcaggttacgagtatctgtgtattgacgattgctggatggccccacaacgggattctgagggaagacttcaggctgatccgcagcgcttccctcatggcataaggcagctggcaaaccacgtccacagtaaggggctcaaattgggaatctacgcggacgtgggcaataagacctgtgccggttttccgggatcattcgggtattatgacattgacgcccaaacgtttgctgattggggcgttgacctgctgaaattcgatggttgctactgtgacagcctcgaaaacctggcagacggctacaagcatatgtctctcgccctgaatagaaccggtcggccaatcgtatattcctgcgagtggcctctttacatgtggccatttcagaaaccgaactacacagaaattcgccagtattgcaatcattggaggaacttcgctgatatcgatgactcatggaagtccataaagagcatcttggactggaccagtcggaatcaggagcgaattgtggatgtcgcaggccctggaggatggaacgatccagacatgctggtgatcggcaattttggcctctcttgggatcagcaggttacccaaatggctctgtgggcaattatggccggtcctcttttcatgagcaacgatctgcgcgctatctcaccacaggcaaaggccctgctccaagacaaagatgtgatagccatcaatcaggacccgttgggaaagcagggctaccagctgagaaagggcgacaactttgaggtctgggaaaggcctttgagtggagatgcgtgggctgtggccattattaatcggcaagagatcggaggtccacgctcctatacaattcctgtagcatctcttggcaagggcgttgcctgtaacccagcttgcttcatcactcagcttctgccggtgaagagaaaactgggtttctacgaagcaaccagcaggctccgatcccacatcaaccctacaggaaccgtcctcttgcagctggagaatacgatgcagacctcactgaaggacctcctg

SEQ ID NO: 542 - protein, 398 aa, Artificial Sequence
  variant of human alpha-galactosidase A
LDNGLARTPTMGWLHWERFMCNLDCQEEPDSCISEKLFEEMAERMVTEGWKDAGYEYLCIDDCWMAPQRDSEGRLQADPQRFPHGIRQLANHVHSKGLKLGIYADVGNKTCAGFPGSFGYYDIDAQTFADWGVDLLKFDGCYCDSLENLADGYKHMSLALNRTGRPIVYSCEWPLYMWPFQKPNYTEIRQYCNHWRNFADIDDSWKSIKSILDWTSRNQERIVDVAGPGGWNDPDMLVIGNFGLSWDQQVTQMALWAIMAGPLFMSNDLRAISPQAKALLQDKDVIAINQDPLGKQGYQLRKGDNFEVWERPLSGDAWAVAIINRQEIGGPRSYTIPVASLGKGVACNPACFITQLLPVKRKLGFYEATSRLRSHINPTGTVLLQLENTMQTSLKDLL

SEQ ID NO: 543 - DNA, 1194 bp, Artificial Sequence
  variant of human alpha-galactosidase A
ctggataatggattggctagaacacctaccatggggtggcttcactgggagaggttcatgtgcaacctggactgtcaggaagaaccagacagctgcatctccgagaagctctttgaggaaatggccgaacgaatggtgactgagggctggaaagatgcaggttacgagtatctgtgtattgacgattgctggatggccccacaacgggattctgagggaagacttcaggctgatccgcagcgcttccctcatggcataaggcagctggcaaaccacgtccacagtaaggggctcaaattgggaatctacgcggacgtgggcaataagacctgtgccggttttccgggatcattcgggtattatgacattgacgcccaaacgtttgctgattggggcgttgacctgctgaaattcgatggttgctactgtgacagcctcgaaaacctggcagacggctacaagcatatgtctctcgccctgaatagaaccggtcggccaatcgtatattcctgcgagtggcctctttacatgtggccatttcagaaaccgaactacacagaaattcgccagtattgcaatcattggaggaacttcgctgatatcgatgactcatgggcctccataaagagcatcttggactggaccagtcggaatcaggagcgaattgtggatgtcgcaggccctggaggatggaacgatccagacatgctggtgatcggcaattttggcctctcttgggatcagcaggttacccaaatggctctgtgggcaattatggccggtcctcttttcatgagcaacgatctgcgcgcgatctcaccacaggcaaaggccctgctccaagacaaagatgtgatagccatcaatcaggacccgttgggaaagcagggctaccagctgagaaaaggcgacaactttgaggtctgggaaaggcctttgagtggactcgcgtgggctgtggccataattaatcggcaagagatcggaggtccacgctcctatacaattcctgtagcatctcttggcaagggcgttgcctgtaacccagcttgcttcatcactcagcttctgccggtgaagagaaaactgggtttctacgaagctaccagcaggctccgatcccacatcaaccctacaggaaccgtcctcttgcagctggagaatacgatgcagatgtcactgaaggacctcctg

SEQ ID NO: 544 - protein, 398 aa, Artificial Sequence
  variant of human alpha-galactosidase A
LDNGLARTPTMGWLHWERFMCNLDCQEEPDSCISEKLFEEMAERMVTEGWKDAGYEYLCIDDCWMAPQRDSEGRLQADPQRFPHGIRQLANHVHSKGLKLGIYADVGNKTCAGFPGSFGYYDIDAQTFADWGVDLLKFDGCYCDSLENLADGYKHMSLALNRTGRPIVYSCEWPLYMWPFQKPNYTEIRQYCNHWRNFADIDDSWASIKSILDWTSRNQERIVDVAGPGGWNDPDMLVIGNFGLSWDQQVTQMALWAIMAGPLFMSNDLRAISPQAKALLQDKDVIAINQDPLGKQGYQLRKGDNFEVWERPLSGLAWAVAIINRQEIGGPRSYTIPVASLGKGVACNPACFITQLLPVKRKLGFYEATSRLRSHINPTGTVLLQLENTMQMSLKDLL

SEQ ID NO: 545 - DNA, 1194 bp, Artificial Sequence
  variant of human alpha-galactosidase A
ctggataatggattggctagaacacctaccatggggtggcttcactgggagaggttcatgtgcaacctggactgtcaggaagaaccagacagctgcatctccgagaagctctttatggaaatggccgaactgatggtgaccgagggctggaaagatgcaggttacgagtatctgtgtattgacgattgctggatggccccacaacgggattctgagggaagacttcaggctgatccgcagcgcttccctcatggcataaggcagctggcaaactacgtccacagtaaggggctcaaattgggaatctacgcggacgtgggcaataagacctgtgccggttttccgggatcattcgggtattatgacattgacgcccaaacgtttgctgattggggcgttgacctgctgaaattcgatggttgctactgtgacagcctcgaaaacctggcagacggctacaagcatatgtctctcgccctgaatagaaccggtcggtcaatcgtatattcctgcgagtggcctctttacatgtggccatttcagaaaccgaactacacagaaattcgccagtattgcaatcattggaggaacttcgctgatatcgatgactcatgggcctccataaagagcatcttggactggaccagtcggaatcaggagcgaattgtggatgtcgcaggccctggaggatggaacgatccagacatgctggtgatcggcaattttggcctctcttgggaccagcaggttacccaaatggctctgtgggcaattatggccgcccctcttttcatgagcaacgatctgcgcgctatctcaccacaggcaaaggccctgctccaagacaaagatgtgatagccatcaatcaggacccgttgggaaagcagggctaccagctgagaaaaggcgacaactttgaggtctgggaaaggcctttgagtggactcgcgtgggctgtggccatgattaatcggcaagagatcggaggtccacgctcctatacaattcctgtagcatctcttggcaagggcgttgcctgtaacccagcttgcttcatcactcagcttctgccggtgaagagaaaactgggtttctacgaagctaccagcaggctccgatcccacatcaaccctacaggaaccgtcctcttgcagctggagaatacgatgcagacttcactgaaggacctcctg

SEQ ID NO: 546 - protein, 398 aa, Artificial Sequence
  variant of human alpha-galactosidase A
LDNGLARTPTMGWLHWERFMCNLDCQEEPDSCISEKLFMEMAELMVTEGWKDAGYEYLCIDDCWMAPQRDSEGRLQADPQRFPHGIRQLANYVHSKGLKLGIYADVGNKTCAGFPGSFGYYDIDAQTFADWGVDLLKFDGCYCDSLENLADGYKHMSLALNRTGRSIVYSCEWPLYMWPFQKPNYTEIRQYCNHWRNFADIDDSWASIKSILDWTSRNQERIVDVAGPGGWNDPDMLVIGNFGLSWDQQVTQMALWAIMAAPLFMSNDLRAISPQAKALLQDKDVIAINQDPLGKQGYQLRKGDNFEVWERPLSGLAWAVAMINRQEIGGPRSYTIPVASLGKGVACNPACFITQLLPVKRKLGFYEATSRLRSHINPTGTVLLQLENTMQTSLKDLL

SEQ ID NO: 547 - DNA, 1194 bp, Artificial Sequence
  variant of human alpha-galactosidase A
ctggataatggattggctagaacacctaccatggggtggcttcactgggagaggttcatgtgcaacctggactgtcaggaagaaccagacagctgcatctccgagaagctctttatggaaatggccgaactgatggtgaccgagggctggaaagatgcaggttacgagtatctgtgtattgacgattgctggatggccccacaacgggattctgagggaagacttcaggctgatccgcagcgcttccctcatggcataaggcagctggcaaactacgtccacagtaaggggctcaaattgggaatctacgcggacgtgggcaataagacctgtgccggttttccgggatcattcgggtattatgacattgacgcccaaacgtttgctgattggggcgttgacctgctgaaattcgatggttgctactgtgacagcctcgaaaacctggcagacggctacaagcatatgtctctcgccctgaatagaaccggtcggtcaatcgtatattcctgcgagtggcctctttacatgtggccatttcagaaaccgaactacacagaaattcgccagtattgcaatcattggaggaacttcgctgatatcgatgactcatgggcctccataaagagcatcttggactggaccagtcggaatcaggagcgaattgtggatgtcgcaggccctggaggatggaacgatccagacatgctggtgatcggcaattttggcctctcttgggaccagcaggttacccaaatggctctgtgggcaattatggccggccctcttttcatgagcaacgatctgcgcgctatctcaccacaggcaaaggccctgctccaagacaaagatgtgatagccatcaatcaggacccgttgggaaagcagggctaccagctgagacagggcgacaactttgaggtctgggaaaggcctttgagtggagatgcgtgggctgtggccatgattaatcggcaagagatcggaggtccacgctcctatacaattcctgtagcatctcttggcaagggcgttgcctgtaacccagcttgcttcatcactcagcttctgccggtgaagagaaaactgggtttctacgaagctaccagcaggctccgatcccacatcaaccctacaggaaccgtcctcttgcagctggagaatacgatgcagacctcactgaaggacctcctg

SEQ ID NO: 548 - protein, 398 aa, Artificial Sequence
  variant of human alpha-galactosidase A
LDNGLARTPTMGWLHWERFMCNLDCQEEPDSCISEKLFMEMAELMVTEGWKDAGYEYLCIDDCWMAPQRDSEGRLQADPQRFPHGIRQLANYVHSKGLKLGIYADVGNKTCAGFPGSFGYYDIDAQTFADWGVDLLKFDGCYCDSLENLADGYKHMSLALNRTGRSIVYSCEWPLYMWPFQKPNYTEIRQYCNHWRNFADIDDSWASIKSILDWTSRNQERIVDVAGPGGWNDPDMLVIGNFGLSWDQQVTQMALWAIMAGPLFMSNDLRAISPQAKALLQDKDVIAINQDPLGKQGYQLRQGDNFEVWERPLSGDAWAVAMINRQEIGGPRSYTIPVASLGKGVACNPACFITQLLPVKRKLGFYEATSRLRSHINPTGTVLLQLENTMQTSLKDLL

SEQ ID NO: 549 - DNA, 1194 bp, Artificial Sequence
  variant of human alpha-galactosidase A
ctggataatggattggctagaacacctaccatggggtggcttcactgggagaggttcatgtgcaacctggactgtcaggaagaaccagacagctgcatctccgagaagctctttatggaaatggccgaactgatggtgaccgagggctggaaagatgcaggttacgagtatctgtgtattgacgattgctggatggccccacaacgggattctgagggaagacttcaggctgatccgcagcgcttccctcatggcataaggcagctggcaaactacgtccacagtaaggggctcaaattgggaatctacgcggacgtgggcaataagacctgtgccggttttccgggatcattcgggtattatgacattgacgcccaaacgtttgctgattggggcgttgacctgctgaaattcgatggttgctactgtgacagcctcgaaaacctggcagacggctacaagcatatgtctctcgccctgaatagaaccggtcggccaatcgtatattcctgcgagtggcctctttacatgtggccatttcagaaaccgaactacacagaaattcgccagtattgcaatcattggaggaacttcgctgatatcgatgactcatgggcctccataaagagcatcttggactggaccagttttaatcaggagcgaattgtggatgtcgcaggccctggaggatggaacgatccagacatgctggtgatcggcaattttggcctctcttgggaccagcaggttacccaaatggctctgtgggcaattatggccggccctcttttcatgagcaacgatctgcgcgctatctcaccacaggcaaaggccctgctccaagacaaagatgtgatagccatcaatcaggacccgttgggaaagcagggctaccagctgagacagggcgacaactttgaggtctgggaaaggcctttgagtggagatgcgtgggctgtggccatgattaatcggcaagagatcggaggtccacgctcctatacaattcctgtagcatctcttggcaagggcgttgcctgtaacccagcttgcttcatcactcagcttctgccggtgaagagaaaactgggtttctacgaagctaccagcaggctccgatcccacatcaaccctacaggaaccgtcctcttgcagctggagaatacgatgcagacttcactgaaggacctcctg

SEQ ID NO: 550 - protein, 398 aa, Artificial Sequence
  variant of human alpha-galactosidase A
LDNGLARTPTMGWLHWERFMCNLDCQEEPDSCISEKLFMEMAELMVTEGWKDAGYEYLCIDDCWMAPQRDSEGRLQADPQRFPHGIRQLANYVHSKGLKLGIYADVGNKTCAGFPGSFGYYDIDAQTFADWGVDLLKFDGCYCDSLENLADGYKHMSLALNRTGRPIVYSCEWPLYMWPFQKPNYTEIRQYCNHWRNFADIDDSWASIKSILDWTSFNQERIVDVAGPGGWNDPDMLVIGNFGLSWDQQVTQMALWAIMAGPLFMSNDLRAISPQAKALLQDKDVIAINQDPLGKQGYQLRQGDNFEVWERPLSGDAWAVAMINRQEIGGPRSYTIPVASLGKGVACNPACFITQLLPVKRKLGFYEATSRLRSHINPTGTVLLQLENTMQTSLKDLL

SEQ ID NO: 551 - DNA, 1194 bp, Artificial Sequence
  variant of human alpha-galactosidase A
ctggataatggattggctagaacacctaccatggggtggcttcactgggagaggttcatgtgcaacctggactgtcaggaagaaccagacagctgcatctccgagaagctctttatggaaatggccgaactgatggtgtccgagggctggaaagatgcaggttacgagtatctgtgtattgacgattgctggatggccccacaacgggattctgagggaagacttcaggctgatccgcagcgcttccctcatggcataaggcagctggcaaaccacgtccacagtaaggggctcaaattgggaatctacgcggacgtgggcaataagacctgtgccggttttccgggatcattcgggtattatgacattgacgcccaaacgtttgctgattggggcgttgacctgctgaaattcgatggttgctactgtgacagcctcgaaaacctggcagacggctacaagcatatgtctctcgccctgaatagaaccggtcggccaatcgtatattcctgcgagtggcctctttacatgtggccatttcagaaaccgaactacacagaaattcgccagtattgcaatcattggaggaacttcgctgatatcgatgactcatgggcctccataaagagcatcttggactggaccagtcggaatcaggagcgaattgtggatgtcgcaggccctggaggatggaacgatccagacatgctggtgatcggcaattttggcctctcttgggatcagcaggttacccaaatggctctgtgggcaattatggccggccctcttttcatgagcaacgatctgcgcgcgatctcaccacaggcaaaggccctgctccaagacaaagatgtgatagccatcaatcaggacccgttgggaaagcagggctaccagctgagaaaaggcgacaactttgaggtctgggaaaggcctttgagtggactcgcgtgggctgtggccataattaatcggcaagagatcggaggtccacgctcctatacaattcctgtagcatctcttggcaagggcgttgcctgtaacccagcttgcttcatcactcagcttctgccggtgaagagaaaactgggtttctacgaagctaccagcaggctccgatcccacatcaaccctacaggaaccgtcctcttgcagctggagaatacgatgcagacttcactgaaggacctcctg

SEQ ID NO: 552 - protein, 398 aa, Artificial Sequence
  variant of human alpha-galactosidase A
LDNGLARTPTMGWLHWERFMCNLDCQEEPDSCISEKLFMEMAELMVSEGWKDAGYEYLCIDDCWMAPQRDSEGRLQADPQRFPHGIRQLANHVHSKGLKLGIYADVGNKTCAGFPGSFGYYDIDAQTFADWGVDLLKFDGCYCDSLENLADGYKHMSLALNRTGRPIVYSCEWPLYMWPFQKPNYTEIRQYCNHWRNFADIDDSWASIKSILDWTSRNQERIVDVAGPGGWNDPDMLVIGNFGLSWDQQVTQMALWAIMAGPLFMSNDLRAISPQAKALLQDKDVIAINQDPLGKQGYQLRKGDNFEVWERPLSGLAWAVAIINRQEIGGPRSYTIPVASLGKGVACNPACFITQLLPVKRKLGFYEATSRLRSHINPTGTVLLQLENTMQTSLKDLL

SEQ ID NO: 553 - DNA, 1194 bp, Artificial Sequence
  variant of human alpha-galactosidase A
ctggataatggattggctagaacacctaccatggggtggcttcactgggagaggttcatgtgcaacctggactgtcaggaagaaccagacagctgcatctccgagaagctctttatggaaatggccgaactgatggtgtccgagggctggaaagatgcaggttacgagtatctgtgtattgacgattgctggatggccccacaacgggattctgagggaagacttcaggctgatccgcagcgcttccctcatggcataaggcagctggcaaactacgtccacagtaaggggctcaaattgggaatctacgcggacgtgggcaataagacctgtgccggttttccgggatcattcgggtattatgacattgacgcccaaacgtttgctgattggggcgttgacctgctgaaattcgatggttgctactgtgacagcctcgaaaacctggcagacggctacaagcatatgtctctcgccctgaatagaaccggtcggccaatcgtatattcctgcgagtggcctctttacatgtggccatttcagaaaccgaactacacagaaattcgccagtattgcaatcattggaggaacttcgctgatatcgatgactcatggaagtccataaagagcatcttggactggaccagttttaatcaggagcgaattgtggatgtcgcaggccctggaggatggaacgatccagacatgctggtgatcggcaattttggcctctcttgggatcagcaggttacccaaatggctctgtgggcaattatggccggtcctcttttcatgagcaacgatctgcgcgcgatctcaccacaggcaaaggccctgctccaagacaaagatgtgatagccatcaatcaggacccgttgggaaagcagggctaccagctgagaaaaggcgacaactttgaggtctgggaaaggcctttgagtggagatgcgtgggctgtggccataattaatcggcaagagatcggaggtccacgctcctatacaattcctgtagcatctcttggcaagggcgttgcctgtaacccagcttgcttcatcactcagcttctgccggtgaagagaaaactgggtttctacgaagctaccagcaggctccgatcccacatcaaccctacaggaaccgtcctcttgcagctggagaatacgatgcagacttcactgaaggacctcctg

SEQ ID NO: 554 - protein, 398 aa, Artificial Sequence
  variant of human alpha-galactosidase A
LDNGLARTPTMGWLHWERFMCNLDCQEEPDSCISEKLFMEMAELMVSEGWKDAGYEYLCIDDCWMAPQRDSEGRLQADPQRFPHGIRQLANYVHSKGLKLGIYADVGNKTCAGFPGSFGYYDIDAQTFADWGVDLLKFDGCYCDSLENLADGYKHMSLALNRTGRPIVYSCEWPLYMWPFQKPNYTEIRQYCNHWRNFADIDDSWKSIKSILDWTSFNQERIVDVAGPGGWNDPDMLVIGNFGLSWDQQVTQMALWAIMAGPLFMSNDLRAISPQAKALLQDKDVIAINQDPLGKQGYQLRKGDNFEVWERPLSGDAWAVAIINRQEIGGPRSYTIPVASLGKGVACNPACFITQLLPVKRKLGFYEATSRLRSHINPTGTVLLQLENTMQTSLKDLL

SEQ ID NO: 555 - DNA, 1194 bp, Artificial Sequence
  variant of human alpha-galactosidase A
ctggataatggattggctagaacacctaccatggggtggcttcactgggagaggttcatgtgcaacctggactgtcaggaagaaccagacagctgcatctccgagaagctctttgaggaaatggccgaacgaatggtgactgagggctggaaagatgcaggttacgagtatctgtgtattgacgattgctggatggccccacaacgggattctgagggaagacttcaggctgatccgcagcgcttccctcatggcataaggcagctggcaaactacgtccacagtaaggggctcaaattgggaatctacgcggacgtgggcaataagacctgtgccggttttccgggatcattcgggtattatgacattgacgcccaaacgtttgctgattggggcgttgacctgctgaaattcgatggttgctactgtgacagcctcgaaaacctggcagacggctacaagcatatgtctctcgccctgaatagaaccggtcggccaatcgtatattcctgcgagtggcctctttacatgtggccatttcagaaaccgaactacacagaaattcgccagtattgcaatcattggaggaacttcgctgatatcgatgactcatgggcctccataaagagcatcttggactggaccagtcggaatcaggagcgaattgtggatgtcgcaggccctggaggatggaacgatccagacatgctggtgatcggcaattttggcctctcttgggaccagcaggttacccaaatggctctgtgggcaattatggccggtcctcttttcatgagcaacgatctgcgcgcgatctcaccacaggcaaaggccctgctccaagacaaagatgtgatagccatcaatcaggacccgttgggaaagcagggctaccagctgagacagggcgacaactttgaggtctgggaaaggcctttgagtggagatgcgtgggctgtggccataattaatcggcaagagatcggaggtccacgctcctatacaattgctgtagcatctcttggcaagggcgttgcctgtaacccagcttgcttcatcactcagcttctgccggtgaagagaaaactgggtttctacgaagcaaccagcaggctccgatcccacatcaaccctacaggaaccgtcctcttgcagctggagaatacgatgcagacctcactgaaggacctcctg

SEQ ID NO: 556 - protein, 398 aa, Artificial Sequence
  variant of human alpha-galactosidase A
LDNGLARTPTMGWLHWERFMCNLDCQEEPDSCISEKLFEEMAERMVTEGWKDAGYEYLCIDDCWMAPQRDSEGRLQADPQRFPHGIRQLANYVHSKGLKLGIYADVGNKTCAGFPGSFGYYDIDAQTFADWGVDLLKFDGCYCDSLENLADGYKHMSLALNRTGRPIVYSCEWPLYMWPFQKPNYTEIRQYCNHWRNFADIDDSWASIKSILDWTSRNQERIVDVAGPGGWNDPDMLVIGNFGLSWDQQVTQMALWAIMAGPLFMSNDLRAISPQAKALLQDKDVIAINQDPLGKQGYQLRQGDNFEVWERPLSGDAWAVAIINRQEIGGPRSYTIAVASLGKGVACNPACFITQLLPVKRKLGFYEATSRLRSHINPTGTVLLQLENTMQTSLKDLL

SEQ ID NO: 557 - DNA, 1194 bp, Artificial Sequence
  variant of human alpha-galactosidase A
ctggataatggattggctagaacacctaccatggggtggcttcactgggagaggttcatgtgcaacctggactgtcaggaagaaccagacagctgcatctccgagaagctctttgaagaaatggccgaactgatggtgaccgagggctggaaagatgcaggttacgagtatctgtgtattgacgattgctggatggccccacaacgggattctgagggaagacttcaggctgatccgcagcgcttccctcatggcataaggcagctggcaaactacgtccacagtaaggggctcaaattgggaatctacgcggacgtgggcaataagacctgtgccggttttccgggatcattcgggtattatgacattgacgcccaaacgtttgctgattggggcgttgacctgctgaaattcgatggttgctactgtgacagcctcgaaaacctggcagacggctacaagcatatgtctctcgccctgaatagaaccggtcggccaatcgtatattcctgcgagtggcctctttacatgtggccatttcagaaaccgaactacacagaaattcgccagtattgcaatcattggaggaacttcgctgatatcgatgactcatgggcctccataaagagcatcttggactggaccagttttaatcaggagcgaattgtggatgtcgcaggccctggaggatggaacgatccagacatgctggtgatcggcaattttggcctctcttggaatcagcaggttacccaaatggctctgtgggcaattatggccggccctcttttcatgagcaacgatctgcgccatatctcaccacaggcaaaggccctgctccaagacaaagatgtgatagccatcaatcaggacccgttgggaaagcagggctaccagctgagacagggcgacaactttgaggtctgggaaaggcctttgagtggactcgcgtgggctgtggccataattaatcggcaagagatcggaggtccacgctcctatacaattcctgtagcatctcttggcaagggcgttgcctgtaacccagcttgcttcatcactcagcttctgccggtgaagagaaaactgggtttctacgaagctaccagcaggctccgatcccacatcaaccctacaggaaccgtcctcttgcagctggagaatacgatgcagatgtcactgaaggacctcctg

SEQ ID NO: 558 - protein, 398 aa, Artificial Sequence
  variant of human alpha-galactosidase A
LDNGLARTPTMGWLHWERFMCNLDCQEEPDSCISEKLFEEMAELMVTEGWKDAGYEYLCIDDCWMAPQRDSEGRLQADPQRFPHGIRQLANYVHSKGLKLGIYADVGNKTCAGFPGSFGYYDIDAQTFADWGVDLLKFDGCYCDSLENLADGYKHMSLALNRTGRPIVYSCEWPLYMWPFQKPNYTEIRQYCNHWRNFADIDDSWASIKSILDWTSFNQERIVDVAGPGGWNDPDMLVIGNFGLSWNQQVTQMALWAIMAGPLFMSNDLRHISPQAKALLQDKDVIAINQDPLGKQGYQLRQGDNFEVWERPLSGLAWAVAIINRQEIGGPRSYTIPVASLGKGVACNPACFITQLLPVKRKLGFYEATSRLRSHINPTGTVLLQLENTMQMSLKDLL

SEQ ID NO: 559 - DNA, 1194 bp, Artificial Sequence
  variant of human alpha-galactosidase A
ctggataatggattggctagaacacctaccatggggtggcttcactgggagaggttcatgtgcaacctggactgtcaggaagaaccagacagctgcatctccgagaagctctttgaggaaatggccgaactgatggtgtccgagggctggaaagatgcaggttacgagtatctgtgtattgacgattgctggatggccccacaacgggattctgagggaagacttcaggctgatccgcagcgcttccctcatggcataaggcagctggcaaaccacgtccacagtaaggggctcaaattgggaatctacgcggacgtgggcaataagacctgtgccggttttccgggatcattcgggtattatgacattgacgcccaaacgtttgctgattggggcgttgacctgctgaaattcgatggttgctactgtgacagcctcgaaaacctggcagacggctacaagcatatgtctctcgccctgaatagaaccggtcggtcaatcgtatattcctgcgagtggcctctttacatgtggccatttcagaaaccgaactacacagaaattcgccagtattgcaatcattggaggaacttcgctgatatcgatgactcatgggcctccataaagagcatcttggactggaccagtcggaatcaggagcgaattgtggatgtcgcaggccctggaggatggaacgatccagacatgctggtgatcggcaattttggcctctcttgggatcagcaggttacccaaatggctctgtgggcaattatggccggtcctcttttcatgagcaacgatctgcgccatatctcaccacaggcaaaggccctgctccaagacaaagatgtgatagccatcaatcaggacccgttgggaaagcagggctaccagctgagaaaaggcgacaactttgaggtctgggaaaggcctttgagtggagatgcgtgggctgtggccatgattaatcggcaagagatcggaggtccacgctcctatacaattcctgtagcatctcttggcaagggcgttgcctgtaacccagcttgcttcatcactcagcttctgccggtgaagagaaaactgggtttctacgaatggaccagcaggctccgatcccacatcaaccctacaggaaccgtcctcttgcagctggagaatacgatgcagacttcactgaaggacctcctg

SEQ ID NO: 560 - protein, 398 aa, Artificial Sequence
  variant of human alpha-galactosidase A
LDNGLARTPTMGWLHWERFMCNLDCQEEPDSCISEKLFEEMAELMVSEGWKDAGYEYLCIDDCWMAPQRDSEGRLQADPQRFPHGIRQLANHVHSKGLKLGIYADVGNKTCAGFPGSFGYYDIDAQTFADWGVDLLKFDGCYCDSLENLADGYKHMSLALNRTGRSIVYSCEWPLYMWPFQKPNYTEIRQYCNHWRNFADIDDSWASIKSILDWTSRNQERIVDVAGPGGWNDPDMLVIGNFGLSWDQQVTQMALWAIMAGPLFMSNDLRHISPQAKALLQDKDVIAINQDPLGKQGYQLRKGDNFEVWERPLSGDAWAVAMINRQEIGGPRSYTIPVASLGKGVACNPACFITQLLPVKRKLGFYEWTSRLRSHINPTGTVLLQLENTMQTSLKDLL

SEQ ID NO: 561 - DNA, 1194 bp, Artificial Sequence
  variant of human alpha-galactosidase A
ctggataatggattggctagaacacctaccatggggtggcttcactgggagaggttcatgtgcaacctggactgtcaggaagaaccagacagctgcatctccgagaagctctttgaggaaatggccgaactgatggtgtccgagggctggaaagatgcaggttacgagtatctgtgtattgacgattgctggatggccccacaacgggattctgagggaagacttcaggctgatccgcagcgcttccctcatggcataaggcagctggcaaaccacgtccacagtaaggggctcaaattgggaatctacgcggacgtgggcaataagacctgtgccggttttccgggatcattcgggtattatgacattgacgcccaaacgtttgctgattggggcgttgacctgctgaaattcgatggttgctactgtgacagcctcgaaaacctggcagacggctacaagcatatgtctctcgccctgaatagaaccggtcggccaatcgtatattcctgcgagtggcctctttacatgtggccatttcagaaaccgaactacacagaaattcgccagtattgcaatcattggaggaacttcgctgatatcgatgactcatgggcctccataaagagcatcttggactggaccagttttaatcaggagcgaattgtggatgtcgcaggccctggaggatggaacgatccagacatgctggtgatcggcaattttggcctctcttgggaccagcaggttacccaaatggctctgtgggcaattatggccggtcctcttttcatgagcaacgatctgcgccatatctcaccacaggcaaaggccctgctccaagacaaagatgtgatagccatcaatcaggacccgttgggaaagcagggctaccagctgagaaagggcgacaactttgaggtctgggaaaggcctttgagtggactcgcgtgggctgtggccatgattaatcggcaagagatcggaggtccacgctcctatacaattcctgtagcatctcttggcaagggcgttgcctgtaacccagcttgcttcatcactcagcttctgccggtgaagagaaaactgggtttctacgaagcaaccagcaggctccgatcccacatcaaccctacaggaaccgtcctcttgcagctggagaatacgatgcagacctcactgaaggacctcctg

SEQ ID NO: 562 - protein, 398 aa, Artificial Sequence
  variant of human alpha-galactosidase A
LDNGLARTPTMGWLHWERFMCNLDCQEEPDSCISEKLFEEMAELMVSEGWKDAGYEYLCIDDCWMAPQRDSEGRLQADPQRFPHGIRQLANHVHSKGLKLGIYADVGNKTCAGFPGSFGYYDIDAQTFADWGVDLLKFDGCYCDSLENLADGYKHMSLALNRTGRPIVYSCEWPLYMWPFQKPNYTEIRQYCNHWRNFADIDDSWASIKSILDWTSFNQERIVDVAGPGGWNDPDMLVIGNFGLSWDQQVTQMALWAIMAGPLFMSNDLRHISPQAKALLQDKDVIAINQDPLGKQGYQLRKGDNFEVWERPLSGLAWAVAMINRQEIGGPRSYTIPVASLGKGVACNPACFITQLLPVKRKLGFYEATSRLRSHINPTGTVLLQLENTMQTSLKDLL

SEQ ID NO: 563 - DNA, 1194 bp, Artificial Sequence
  variant of human alpha-galactosidase A
ctggataatggattggctagaacacctcctatggggtggcttcactgggagaggttcatgtgcaacctggactgtcaggaagaaccagacagctgcatctccgagaagctctttgaagaaatggccgaactgatggtgtccgagggctggaaagatgcaggttacgagtatctgtgtattgacgattgctggatggccccacaacgggattctgagggaagacttcaggctgatccgcagcgcttccctcatggcataaggcagctggcaaactacgtccacagtaaggggctcaaattgggaatctacgcggacgtgggcaataagacctgtgccggttttccgggatcattcgggtattatgacattgacgcccaaacgtttgctgattggggcgttgacctgctgaaattcgatggttgctactgtgacagcctcgaaaacctggcagacggctacaagcatatgtctctcgccctgaatagaaccggtcggccaatcgtatattcctgcgagtggcctctttacatgtggccatttcagaaaccgaactacacagaaattcgccagtattgcaatcattggaggaacttcgctgatatcgatgactcatgggcctccataaagagcatcttggactggaccagtcggaatcaggagcgaattgtggatgtcgcaggccctggaggatggaacgatccagacatgctggtgatcggcaattttggcctctcttgggaccagcaggttacccaaatggctctgtgggcaattatggccggtcctcttttcatgagcaacgatctgcgcgcgatctcaccacaggcaaaggccctgctccaagacaaagatgtgatagccatcaatcaggacccgttgggaaagcagggctaccagctgagaaagggcgacaactttgaggtctgggaaaggcctttgagtggagatgcgtgggctgtggccattattaatcggcaagagatcggaggtccacgctcctatacaattcctgtagcatctcttggcaagggcgttgcctgtaacccagcttgcttcatcactcagcttctgccggtgaagagaaaactgggtttctacgaagctaccagcaggctccgatcccacatcaaccctacaggaaccgtcctcttgcagctggagaatacgatgcagatgtcactgaaggacctcctg

SEQ ID NO: 564 - protein, 398 aa, Artificial Sequence
  variant of human alpha-galactosidase A
LDNGLARTPPMGWLHWERFMCNLDCQEEPDSCISEKLFEEMAELMVSEGWKDAGYEYLCIDDCWMAPQRDSEGRLQADPQRFPHGIRQLANYVHSKGLKLGIYADVGNKTCAGFPGSFGYYDIDAQTFADWGVDLLKFDGCYCDSLENLADGYKHMSLALNRTGRPIVYSCEWPLYMWPFQKPNYTEIRQYCNHWRNFADIDDSWASIKSILDWTSRNQERIVDVAGPGGWNDPDMLVIGNFGLSWDQQVTQMALWAIMAGPLFMSNDLRAISPQAKALLQDKDVIAINQDPLGKQGYQLRKGDNFEVWERPLSGDAWAVAIINRQEIGGPRSYTIPVASLGKGVACNPACFITQLLPVKRKLGFYEATSRLRSHINPTGTVLLQLENTMQMSLKDLL

SEQ ID NO: 565 - DNA, 1194 bp, Artificial Sequence
  variant of human alpha-galactosidase A
ctggataatggattggctagaacacctcctatggggtggcttcactgggagaggttcatgtgcaacctggactgtcaggaagaaccagacagctgcatctccgagaagctctttgaagaaatggccgaacggatggtgtccgagggctggaaagatgcaggttacgagtatctgtgtattgacgattgctggatggccccacaacgggattctgagggaagacttcaggctgatccgcagcgcttccctcatggcataaggcagctggcaaaccacgtccacagtaaggggctcaaattgggaatctacgcggacgtgggcaataagacctgtgccggttttccgggatcattcgggtattatgacattgacgcccaaacgtttgctgattggggcgttgacctgctgaaattcgatggttgctactgtgacagcctcgaaaacctggcagacggctacaagcatatgtctctcgccctgaatagaaccggtcggccaatcgtatattcctgcgagtggcctctttacatgtggccatttcagaaaccgaactacacagaaattcgccagtattgcaatcattggaggaacttcgctgatatcgatgactcatgggcctccataaagagcatcttggactggaccagtcggaatcaggagcgaattgtggatgtcgcaggccctggaggatggaacgatccagacatgctggtgatcggcaattttggcctctcttgggaccagcaggttacccaaatggctctgtgggcaattatggccggtcctcttttcatgagcaacgatctgcgccatatctcaccacaggcaaaggccctgctccaagacaaagatgtgatagccatcaatcaggacccgttgggaaagcagggctaccagctgagaaagggcgacaactttgaggtctgggaaaggcctttgagtggagatgcgtgggctgtggccattattaatcggcaagagatcggaggtccacgctcctatacaattcctgtagcatctcttggcaagggcgttgcctgtaacccagcttgcttcatcactcagcttctgccggtgaagagaaaactgggtttctacgaagctaccagcaggctccgatcccacatcaaccctacaggaaccgtcctcttgcagctggagaatacgatgcagacttcactgaaggacctcctg

SEQ ID NO: 566 - protein, 398 aa, Artificial Sequence
  variant of human alpha-galactosidase A
LDNGLARTPPMGWLHWERFMCNLDCQEEPDSCISEKLFEEMAERMVSEGWKDAGYEYLCIDDCWMAPQRDSEGRLQADPQRFPHGIRQLANHVHSKGLKLGIYADVGNKTCAGFPGSFGYYDIDAQTFADWGVDLLKFDGCYCDSLENLADGYKHMSLALNRTGRPIVYSCEWPLYMWPFQKPNYTEIRQYCNHWRNFADIDDSWASIKSILDWTSRNQERIVDVAGPGGWNDPDMLVIGNFGLSWDQQVTQMALWAIMAGPLFMSNDLRHISPQAKALLQDKDVIAINQDPLGKQGYQLRKGDNFEVWERPLSGDAWAVAIINRQEIGGPRSYTIPVASLGKGVACNPACFITQLLPVKRKLGFYEATSRLRSHINPTGTVLLQLENTMQTSLKDLL

SEQ ID NO: 567 - DNA, 1194 bp, Artificial Sequence
  variant of human alpha-galactosidase A
ctggataatggattggctagaacacctcctatggggtggcttcactgggagaggttcatgtgcaacctggactgtcaggaagaaccagacagctgcatctccgagaagctctttgaggaaatggccgaacggatggtgtccgagggctggaaagatgcaggttacgagtatctgtgtattgacgattgctggatggccccacaacgggattctgagggaagacttcaggctgatccgcagcgcttccctcatggcataaggcagctggcaaaccacgtccacagtaaggggctcaaattgggaatctacgcggacgtgggcaataagacctgtgccggttttccgggatcattcgggtattatgacattgacgcccaaacgtttgctgattggggcgttgacctgctgaaattcgatggttgctactgtgacagcctcgaaaacctggcagacggctacaagcatatgtctctcgccctgaatagaaccggtcggtcaatcgtatattcctgcgagtggcctctttacatgtggccatttcagaaaccgaactacacagaaattcgccagtattgcaatcattggaggaacttcgctgatatcgatgactcatggaagtccataaagagcatcttggactggaccagttttaatcaggagcgaattgtggatgtcgcaggccctggaggatggaacgatccagacatgctggtgatcggcaattttggcctctcttggaatcagcaggttacccaaatggctctgtgggcaattatggccggccctcttttcatgagcaacgatctgcgcgctatctcaccacaggcaaaggccctgctccaagacaaagatgtgatagccatcaatcaggacccgttgggaaagcagggctaccagctgagaaaaggcgacaactttgaggtctgggaaaggcctttgagtggagatgcgtgggctgtggccataattaatcggcaagagatcggaggtccacgctcctatacaattgctgtagcatctcttggcaagggcgttgcctgtaacccagcttgcttcatcactcagcttctgccggtgaagagaaaactgggtttctacgaagcaaccagcaggctccgatcccacatcaaccctacaggaaccgtcctcttgcagctggagaatacgatgcagacctcactgaaggacctcctg

SEQ ID NO: 568 - protein, 398 aa, Artificial Sequence
  variant of human alpha-galactosidase A
LDNGLARTPPMGWLHWERFMCNLDCQEEPDSCISEKLFEEMAERMVSEGWKDAGYEYLCIDDCWMAPQRDSEGRLQADPQRFPHGIRQLANHVHSKGLKLGIYADVGNKTCAGFPGSFGYYDIDAQTFADWGVDLLKFDGCYCDSLENLADGYKHMSLALNRTGRSIVYSCEWPLYMWPFQKPNYTEIRQYCNHWRNFADIDDSWKSIKSILDWTSFNQERIVDVAGPGGWNDPDMLVIGNFGLSWNQQVTQMALWAIMAGPLFMSNDLRAISPQAKALLQDKDVIAINQDPLGKQGYQLRKGDNFEVWERPLSGDAWAVAIINRQEIGGPRSYTIAVASLGKGVACNPACFITQLLPVKRKLGFYEATSRLRSHINPTGTVLLQLENTMQTSLKDLL

SEQ ID NO: 569 - DNA, 1194 bp, Artificial Sequence
  variant of human alpha-galactosidase A
ctggataatggattggctagaacacctcctatggggtggcttcactgggagaggttcatgtgcaacctggactgtcaggaagaaccagacagctgcatctccgagaagctctttatggaaatggccgaactgatggtgaccgagggctggaaagatgcaggttacgagtatctgtgtattgacgattgctggatggccccacaacgggattctgagggaagacttcaggctgatccgcagcgcttccctcatggcataaggcagctggcaaaccacgtccacagtaaggggctcaaattgggaatctacgcggacgtgggcaataagacctgtgccggttttccgggatcattcgggtattatgacattgacgcccaaacgtttgctgattggggcgttgacctgctgaaattcgatggttgctactgtgacagcctcgaaaacctggcagacggctacaagcatatgtctctcgccctgaatagaaccggtcggtcaatcgtatattcctgcgagtggcctctttacatgtggccatttcagaaaccgaactacacagaaattcgccagtattgcaatcattggaggaacttcgctgatatcgatgactcatgggcctccataaagagcatcttggactggaccagtcggaatcaggagcgaattgtggatgtcgcaggccctggaggatggaacgatccagacatgctggtgatcggcaattttggcctctcttgggaccagcaggttacccaaatggctctgtgggcaattatggccggccctcttttcatgagcaacgatctgcgccatatctcaccacaggcaaaggccctgctccaagacaaagatgtgatagccatcaatcaggacccgttgggaaagcagggctaccagctgagaaaaggcgacaactttgaggtctgggaaaggcctttgagtggagatgcgtgggctgtggccattattaatcggcaagagatcggaggtccacgctcctatacaattgctgtagcatctcttggcaagggcgttgcctgtaacccagcttgcttcatcactcagcttctgccggtgaagagaaaactgggtttctacgaatggaccagcaggctccgatcccacatcaaccctacaggaaccgtcctcttgcagctggagaatacgatgcagatgtcactgaaggacctcctg

SEQ ID NO: 570 - protein, 398 aa, Artificial Sequence
  variant of human alpha-galactosidase A
LDNGLARTPPMGWLHWERFMCNLDCQEEPDSCISEKLFMEMAELMVTEGWKDAGYEYLCIDDCWMAPQRDSEGRLQADPQRFPHGIRQLANHVHSKGLKLGIYADVGNKTCAGFPGSFGYYDIDAQTFADWGVDLLKFDGCYCDSLENLADGYKHMSLALNRTGRSIVYSCEWPLYMWPFQKPNYTEIRQYCNHWRNFADIDDSWASIKSILDWTSRNQERIVDVAGPGGWNDPDMLVIGNFGLSWDQQVTQMALWAIMAGPLFMSNDLRHISPQAKALLQDKDVIAINQDPLGKQGYQLRKGDNFEVWERPLSGDAWAVAIINRQEIGGPRSYTIAVASLGKGVACNPACFITQLLPVKRKLGFYEWTSRLRSHINPTGTVLLQLENTMQMSLKDLL

SEQ ID NO: 571 - DNA, 1194 bp, Artificial Sequence
  variant of human alpha-galactosidase A
ctggataatggattggctagaacacctcccatggggtggcttcactgggagaggttcatgtgcaacctggactgtcaggaagaaccagacagctgcatctccgagaagctctttatggaaatggccgaactgatggtgtccgagggctggaaagatgcaggttacgagtatctgtgtattgacgattgctggatggccccacaacgggattctgagggaagacttcaggctgatccgcagcgcttccctcatggcataaggcagctggcaaactacgtccacagtaaggggctcaaattgggaatctacgcggacgtgggcaataagacctgtgccggttttccgggatcattcgggtattatgacattgacgcccaaacgtttgctgattggggcgttgacctgctgaaattcgatggttgctactgtgacagcctcgaaaacctggcagacggctacaagcatatgtctctcgccctgaatagaaccggtcggtcaatcgtatattcctgcgagtggcctctttacatgtggccatttcagaaaccgaactacacagaaattcgccagtattgcaatcattggaggaacttcgctgatatcgatgactcatggaagtccataaagagcatcttggactggaccagtcggaatcaggagcgaattgtggatgtcgcaggccctggaggatggaacgatccagacatgctggtgatcggcaattttggcctctcttgggatcagcaggttacccaaatggctctgtgggcaattatggccggtcctcttttcatgagcaacgatctgcgcgcgatctcaccacaggcaaaggccctgctccaagacaaagatgtgatagccatcaatcaggacccgttgggaaagcagggctaccagctgagaaaaggcgacaactttgaggtctgggaaaggcctttgagtggagatgcgtgggctgtggccataattaatcgccaagagatcggaggtccacgctcctatacaattcctgtagcatctcttggcaagggcgttgcctgtaacccagcttgcttcatcactcagcttctgccggtgaagagaaaactgggtttctacgaagctaccagcaggctccgatcccacatcaaccctacaggaaccgtcctcttgcagctggagaatacgatgcagatgtcactgaaggacctcctg

SEQ ID NO: 572 - protein, 398 aa, Artificial Sequence
  variant of human alpha-galactosidase A
LDNGLARTPPMGWLHWERFMCNLDCQEEPDSCISEKLFMEMAELMVSEGWKDAGYEYLCIDDCWMAPQRDSEGRLQADPQRFPHGIRQLANYVHSKGLKLGIYADVGNKTCAGFPGSFGYYDIDAQTFADWGVDLLKFDGCYCDSLENLADGYKHMSLALNRTGRSIVYSCEWPLYMWPFQKPNYTEIRQYCNHWRNFADIDDSWKSIKSILDWTSRNQERIVDVAGPGGWNDPDMLVIGNFGLSWDQQVTQMALWAIMAGPLFMSNDLRAISPQAKALLQDKDVIAINQDPLGKQGYQLRKGDNFEVWERPLSGDAWAVAIINRQEIGGPRSYTIPVASLGKGVACNPACFITQLLPVKRKLGFYEATSRLRSHINPTGTVLLQLENTMQMSLKDLL

SEQ ID NO: 573 - DNA, 1194 bp, Artificial Sequence
  variant of human alpha-galactosidase A
ctggataatggattggctagaacacctcctatggggtggcttcactgggagaggttcatgtgcaacctggactgtcaggaagaaccagacagctgcatctccgagaagctctttgaggaaatggccgaacgaatggtgactgagggctggaaagatgcaggttacgagtatctgtgtattgacgattgctggatggccccacaacgggattctgagggaagacttcaggctgatccgcagcgcttccctcatggcataaggcagctggcaaactacgtccacagtaaggggctcaaattgggaatctacgcggacgtgggcaataagacctgtgccggttttccgggatcattcgggtattatgacattgacgcccaaacgtttgctgattggggcgttgacctgctgaaattcgatggttgctactgtgacagcctcgaaaacctggcagacggctacaagcatatgtctctcgccctgaatagaaccggtcggccaatcgtatattcctgcgagtggcctctttacatgtggccatttcagaaaccgaactacacagaaattcgccagtattgcaatcattggaggaacttcgctgatatcgatgactcatggaagtccataaagagcatcttggactggaccagtcggaatcaggagcgaattgtggatgtcgcaggccctggaggatggaacgatccagacatgctggtgatcggcaattttggcctctcttgggatcagcaggttacccaaatggctctgtgggcaattatggccggccctcttttcatgagcaacgatctgcgcgcgatctcaccacaggcaaaggccctgctccaagacaaagatgtgatagccatcaatcaggacccgttgggaaagcagggctaccagctgagaaaaggcgacaactttgaggtctgggaaaggcctttgagtggagatgcgtgggctgtggccatgattaatcggcaagagatcggaggtccacgctcctatacaattcctgtagcatctcttggcaagggcgttgcctgtaacccagcttgcttcatcactcagcttctgccggtgaagagaaaactgggtttctacgaagcaaccagcaggctccgatcccacatcaaccctacaggaaccgtcctcttgcagctggagaatacgatgcagacttcactgaaggacctcctg

SEQ ID NO: 574 - protein, 398 aa, Artificial Sequence
  variant of human alpha-galactosidase A
LDNGLARTPPMGWLHWERFMCNLDCQEEPDSCISEKLFEEMAERMVTEGWKDAGYEYLCIDDCWMAPQRDSEGRLQADPQRFPHGIRQLANYVHSKGLKLGIYADVGNKTCAGFPGSFGYYDIDAQTFADWGVDLLKFDGCYCDSLENLADGYKHMSLALNRTGRPIVYSCEWPLYMWPFQKPNYTEIRQYCNHWRNFADIDDSWKSIKSILDWTSRNQERIVDVAGPGGWNDPDMLVIGNFGLSWDQQVTQMALWAIMAGPLFMSNDLRAISPQAKALLQDKDVIAINQDPLGKQGYQLRKGDNFEVWERPLSGDAWAVAMINRQEIGGPRSYTIPVASLGKGVACNPACFITQLLPVKRKLGFYEATSRLRSHINPTGTVLLQLENTMQTSLKDLL

SEQ ID NO: 575 - DNA, 1194 bp, Artificial Sequence
  variant of human alpha-galactosidase A
ctggataatggattggctagaacacctaccatggggtggcttcactgggagaggttcatgtgcaacctggactgtcaggaagaaccagacagctgcatctccgagaagctctttatggaaatggccgaactgatggtgaccgagggctggaaagatgcaggttacgagtatctgtgtattgacgattgctggatggccccacaacgggattctgagggaagacttcaggctgatccgcagcgcttccctcatggcataaggcagctggcaaactacgtccacagtaaggggctcaaattgggaatctacgcggacgtgggcaataagacctgtgccggttttccgggatcattcgggtattatgacattgacgcccaaacgtttgctgattggggcgttgacctgctgaaattcgatggttgctactgtgacagcctcgaaaacctggcagacggctacaagcatatgtctctcgccctgaatagaaccggtcggccaatcgtatattcctgcgagtggcctctttacatgtggccatttcagaaaccgaactacacagaaattcgccagtattgcaatcattggaggaacttcgctgatatcgatgactcatgggcctccataaagagcatcttggactggaccagtcggaatcaggagcgaattgtggatgtcgcaggccctggaggatggaacgatccagacatgctggtgatcggcaattttggcctctcttgggatcagcaggttacccaaatggctctgtgggcaattatggccggtcctcttttcatgagcaacgatctgcgcgcgatctcaccacaggcaaaggccctgctccaagacaaagatgtgatagccatcaatcaggacccgttgggaaagcagggctaccagctgagacagggcgacaactttgaggtctgggaaaggcctttgagtggagatgcgtgggctgtggccatgattaatcggcaagagatcggaggtccacgctcctatacaattcctgtagcatctcttggcaagggcgttgcctgtaacccagcttgcttcatcactcagcttctgccggtgaagagaaaactgggtttctacgaagcaaccagcaggctccgatcccacatcaaccctacaggaaccgtcctcttgcagctggagaatacgatgcagacttcactgaaggacctcctg

SEQ ID NO: 576 - protein, 398 aa, Artificial Sequence
  variant of human alpha-galactosidase A
LDNGLARTPTMGWLHWERFMCNLDCQEEPDSCISEKLFMEMAELMVTEGWKDAGYEYLCIDDCWMAPQRDSEGRLQADPQRFPHGIRQLANYVHSKGLKLGIYADVGNKTCAGFPGSFGYYDIDAQTFADWGVDLLKFDGCYCDSLENLADGYKHMSLALNRTGRPIVYSCEWPLYMWPFQKPNYTEIRQYCNHWRNFADIDDSWASIKSILDWTSRNQERIVDVAGPGGWNDPDMLVIGNFGLSWDQQVTQMALWAIMAGPLFMSNDLRAISPQAKALLQDKDVIAINQDPLGKQGYQLRQGDNFEVWERPLSGDAWAVAMINRQEIGGPRSYTIPVASLGKGVACNPACFITQLLPVKRKLGFYEATSRLRSHINPTGTVLLQLENTMQTSLKDLL

SEQ ID NO: 577 - DNA, 1194 bp, Artificial Sequence
  variant of human alpha-galactosidase A
ctggataatggattggctagaacacctaccatggggtggcttcactgggagaggttcatgtgcaacctggactgtcaggaagaaccagacagctgcatctccgagaagctctttatggaaatggccgaactgatggtgaccgagggctggaaagatgcaggttacgagtatctgtgtattgacgattgctggatggccccacaacgggattctgagggaagacttcaggctgatccgcagcgcttccctcatggcataaggcagctggcaaaccacgtccacagtaaggggctcaaattgggaatctacgcggacgtgggcaataagacctgtgccggttttccgggatcattcgggtattatgacattgacgcccaaacgtttgctgattggggcgttgacctgctgaaattcgatggttgctactgtgacagcctcgaaaacctggcagacggctacaagcatatgtctctcgccctgaatagaaccggtcggccaatcgtatattcctgcgagtggcctctttacatgtggccatttcagaaaccgaactacacagaaattcgccagtattgcaatcattggaggaacttcgctgatatcgatgactcatgggcctccataaagagcatcttggactggaccagtcggaatcaggagcgaattgtggatgtcgcaggccctggaggatggaacgatccagacatgctggtgatcggcaattttggcctctcttgggaccagcaggttacccaaatggctctgtgggcaattatggccggccctcttttcatgagcaacgatctgcgcgcgatctcaccacaggcaaaggccctgctccaagacaaagatgtgatagccatcaatcaggacccgttgggaaagcagggctaccagctgagaaaaggcgacaactttgaggtctgggaaaggcctttgagtggagatgcgtgggctgtggccattattaatcggcaagagatcggaggtccacgctcctatacaattcctgtagcatctcttggcaagggcgttgcctgtaacccagcttgcttcatcactcagcttctgccggtgaagagaaaactgggtttctacgaagctaccagcaggctccgatcccacatcaaccctacaggaaccgtcctcttgcagctggagaatacgatgcagatgtcactgaaggacctcctg

SEQ ID NO: 578 - protein, 398 aa, Artificial Sequence
  variant of human alpha-galactosidase A
LDNGLARTPTMGWLHWERFMCNLDCQEEPDSCISEKLFMEMAELMVTEGWKDAGYEYLCIDDCWMAPQRDSEGRLQADPQRFPHGIRQLANHVHSKGLKLGIYADVGNKTCAGFPGSFGYYDIDAQTFADWGVDLLKFDGCYCDSLENLADGYKHMSLALNRTGRPIVYSCEWPLYMWPFQKPNYTEIRQYCNHWRNFADIDDSWASIKSILDWTSRNQERIVDVAGPGGWNDPDMLVIGNFGLSWDQQVTQMALWAIMAGPLFMSNDLRAISPQAKALLQDKDVIAINQDPLGKQGYQLRKGDNFEVWERPLSGDAWAVAIINRQEIGGPRSYTIPVASLGKGVACNPACFITQLLPVKRKLGFYEATSRLRSHINPTGTVLLQLENTMQMSLKDLL

SEQ ID NO: 579 - DNA, 1194 bp, Artificial Sequence
  variant of human alpha-galactosidase A
ctggataatggattggctagaacacctcctatggggtggcttcactgggagaggttcatgtgcaacctggactgtcaggaagaaccagacagctgcatctccgagaagctctttgaggaaatggccgaactgatggtgtccgagggctggaaagatgcaggttacgagtatctgtgtattgacgattgctggatggccccacaacgggattctgagggaagacttcaggctgatccgcagcgcttccctcatggcataaggcagctggcaaaccacgtccacagtaaggggctcaaattgggaatctacgcggacgtgggcaataagacctgtgccggttttccgggatcattcgggtattatgacattgacgcccaaacgtttgctgattggggcgttgacctgctgaaattcgatggttgctactgtgacagcctcgaaaacctggcagacggctacaagcatatgtctctcgccctgaatagaaccggtcggccaatcgtatattcctgcgagtggcctctttacatgtggccatttcagaaaccgaactacacagaaattcgccagtattgcaatcattggaggaacttcgctgatatcgatgactcatgggcctccataaagagcatcttggactggaccagtcggaatcaggagcgaattgtggatgtcgcaggccctggaggatggaacgatccagacatgctggtgatcggcaattttggcctctcttgggatcagcaggttacccaaatggctctgtgggcaattatggccggccctcttttcatgagcaacgatctgcgcgcgatctcaccacaggcaaaggccctgctccaagacaaagatgtgatagccatcaatcaggacccgttgggaaagcagggctaccagctgagaaagggcgacaactttgaggtctgggaaaggcctttgagtggagatgcgtgggctgtggccattattaatcggcaagagatcggaggtccacgctcctatacaattcctgtagcatctcttggcaagggcgttgcctgtaacccagcttgcttcatcactcagcttctgccggtgaagagaaaactgggtttctacgaagctaccagcaggctccgatcccacatcaaccctacaggaaccgtcctcttgcagctggagaatacgatgcagacttcactgaaggacctcctg

SEQ ID NO: 580 - protein, 398 aa, Artificial Sequence
  variant of human alpha-galactosidase A
LDNGLARTPPMGWLHWERFMCNLDCQEEPDSCISEKLFEEMAELMVSEGWKDAGYEYLCIDDCWMAPQRDSEGRLQADPQRFPHGIRQLANHVHSKGLKLGIYADVGNKTCAGFPGSFGYYDIDAQTFADWGVDLLKFDGCYCDSLENLADGYKHMSLALNRTGRPIVYSCEWPLYMWPFQKPNYTEIRQYCNHWRNFADIDDSWASIKSILDWTSRNQERIVDVAGPGGWNDPDMLVIGNFGLSWDQQVTQMALWAIMAGPLFMSNDLRAISPQAKALLQDKDVIAINQDPLGKQGYQLRKGDNFEVWERPLSGDAWAVAIINRQEIGGPRSYTIPVASLGKGVACNPACFITQLLPVKRKLGFYEATSRLRSHINPTGTVLLQLENTMQTSLKDLL

SEQ ID NO: 581 - DNA, 1194 bp, Artificial Sequence
  variant of human alpha-galactosidase A
ctggataatggattggctagaacacctcctatggggtggcttcactgggagaggttcatgtgcaacctggactgtcaggaagaaccagacagctgcatctccgagaagctctttgaggaaatggccgaacgaatggtgactgagggctggaaagatgcaggttacgagtatctgtgtattgacgattgctggatggccccacaacgggattctgagggaagacttcaggctgatccgcagcgcttccctcatggcataaggcagctggcaaaccacgtccacagtaaggggctcaaattgggaatctacgcggacgtgggcaataagacctgtgccggttttccgggatcattcgggtattatgacattgacgcccaaacgtttgctgattggggcgttgacctgctgaaattcgatggttgctactgtgacagcctcgaaaacctggcagacggctacaagcatatgtctctcgccctgaatagaaccggtcggccaatcgtatattcctgcgagtggcctctttacatgtggccatttcagaaaccgaactacacagaaattcgccagtattgcaatcattggaggaacttcgctgatatcgatgactcatgggcctccataaagagcatcttggactggaccagtcggaatcaggagcgaattgtggatgtcgcaggccctggaggatggaacgatccagacatgctggtgatcggcaattttggcctctcttggaatcagcaggttacccaaatggctctgtgggcaattatggccggccctcttttcatgagcaacgatctgcgcgctatctcaccacaggcaaaggccctgctccaagacaaagatgtgatagccatcaatcaggacccgttgggaaagcagggctaccagctgagaaagggcgacaactttgaggtctgggaaaggcctttgagtggactcgcgtgggctgtggccataattaatcggcaagagatcggaggtccacgctcctatacaattcctgtagcatctcttggcaagggcgttgcctgtaacccagcttgcttcatcactcagcttctgccggtgaagagaaaactgggtttctacgaagctaccagcaggctccgatcccacatcaaccctacaggaaccgtcctcttgcagctggagaatacgatgcagacttcactgaaggacctcctg

SEQ ID NO: 582 - protein, 398 aa, Artificial Sequence
  variant of human alpha-galactosidase A
LDNGLARTPPMGWLHWERFMCNLDCQEEPDSCISEKLFEEMAERMVTEGWKDAGYEYLCIDDCWMAPQRDSEGRLQADPQRFPHGIRQLANHVHSKGLKLGIYADVGNKTCAGFPGSFGYYDIDAQTFADWGVDLLKFDGCYCDSLENLADGYKHMSLALNRTGRPIVYSCEWPLYMWPFQKPNYTEIRQYCNHWRNFADIDDSWASIKSILDWTSRNQERIVDVAGPGGWNDPDMLVIGNFGLSWNQQVTQMALWAIMAGPLFMSNDLRAISPQAKALLQDKDVIAINQDPLGKQGYQLRKGDNFEVWERPLSGLAWAVAIINRQEIGGPRSYTIPVASLGKGVACNPACFITQLLPVKRKLGFYEATSRLRSHINPTGTVLLQLENTMQTSLKDLL

SEQ ID NO: 583 - DNA, 1194 bp, Artificial Sequence
  variant of human alpha-galactosidase A
ctggataatggattggctagaacacctcccatggggtggcttcactgggagaggttcatgtgcaacctggactgtcaggaagaaccagacagctgcatctccgagaagctctttgaggaaatggccgaacgaatggtgactgagggctggaaagatgcaggttacgagtatctgtgtattgacgattgctggatggccccacaacgggattctgagggaagacttcaggctgatccgcagcgcttccctcatggcataaggcagctggcaaaccacgtccacagtaaggggctcaaattgggaatctacgcggacgtgggcaataagacctgtgccggttttccgggatcattcgggtattatgacattgacgcccaaacgtttgctgattggggcgttgacctgctgaaattcgatggttgctactgtgacagcctcgaaaacctggcagacggctacaagcatatgtctctcgccctgaatagaaccggtcggccaatcgtatattcctgcgagtggcctctttacatgtggccatttcagaaaccgaactacacagaaattcgccagtattgcaatcattggaggaacttcgctgatatcgatgactcatgggcctccataaagagcatcttggactggaccagtcggaatcaggagcgaattgtggatgtcgcaggccctggaggatggaacgatccagacatgctggtgatcggcaattttggcctctcttgggaccagcaggttacccaaatggctctgtgggcaattatggccggtcctcttttcatgagcaacgatctgcgcgcgatctcaccacaggcaaaggccctgctccaagacaaagatgtgatagccatcaatcaggacccgttgggaaagcagggctaccagctgagaaagggcgacaactttgaggtctgggaaaggcctttgagtggactcgcgtgggctgtggccataattaatcggcaagagatcggaggtccacgctcctatacaattgctgtagcatctcttggcaagggcgttgcctgtaacccagcttgcttcatcactcagcttctgccggtgaagagaaaactgggtttctacgaagcaaccagcaggctccgatcccacatcaaccctacaggaaccgtcctcttgcagctggagaatacgatgcagatgtcactgaaggacctcctg

SEQ ID NO: 584 - protein, 398 aa, Artificial Sequence
  variant of human alpha-galactosidase A
LDNGLARTPPMGWLHWERFMCNLDCQEEPDSCISEKLFEEMAERMVTEGWKDAGYEYLCIDDCWMAPQRDSEGRLQADPQRFPHGIRQLANHVHSKGLKLGIYADVGNKTCAGFPGSFGYYDIDAQTFADWGVDLLKFDGCYCDSLENLADGYKHMSLALNRTGRPIVYSCEWPLYMWPFQKPNYTEIRQYCNHWRNFADIDDSWASIKSILDWTSRNQERIVDVAGPGGWNDPDMLVIGNFGLSWDQQVTQMALWAIMAGPLFMSNDLRAISPQAKALLQDKDVIAINQDPLGKQGYQLRKGDNFEVWERPLSGLAWAVAIINRQEIGGPRSYTIAVASLGKGVACNPACFITQLLPVKRKLGFYEATSRLRSHINPTGTVLLQLENTMQMSLKDLL

SEQ ID NO: 585 - DNA, 1194 bp, Artificial Sequence
  variant of human alpha-galactosidase A
ctggataatggattggctagaacacctcctatggggtggcttcactgggagaggttcatgtgcaacctggactgtcaggaagaaccagacagctgcatctccgagaagctctttgaggaaatggccgaacgaatggtgactgagggctggaaaaatgcaggttacgagtatctgtgtattgacgattgctggatggccccacaacgggattctgagggaagacttcaggctgatccgcagcgcttccctcatggcataaggcagctggcaaaccacgtccacagtaaggggctcaaattgggaatctacgcggacgtgggcaataagacctgtgccggttttccgggatcattcgggtattatgacattgacgcccaaacgtttgctgattggggcgttgacctgctgaaattcgatggttgctactgtgacagcctcgaaaacctggcagacggctacaagcatatgtctctcgccctgaatagaaccggtcggccaatcgtatattcctgcgagtggcctctttacatgtggccatttcagaaaccgaactacacagaaattcgccagtattgcaatcattggaggaacttcgctgatatcgatgactcatgggcctccataaagagcatcttggactggaccagttttaatcaggagcgaattgtggatgtcgcaggccctggaggatggaacgatccagacatgctggtgatcggcaattttggcctctcttgggaccagcaggttacccaaatggctctgtgggcaattatggccggccctcttttcatgagcaacgatctgcgcgctatctcaccacaggcaaaggccctgctccaagacaaagatgtgatagccatcaatcaggacccgttgggaaagcagggctaccagctgagacagggcgacaactttgaggtctgggaaaggcctttgagtggactcgcgtgggctgtggccataattaatcggcaagagatcggaggtccacgctcctatacaattcctgtagcatctcttggcaagggcgttgcctgtaacccagcttgcttcatcactcagcttctgccggtgaagagaaaactgggtttctacgaagctaccagcaggctccgatcccacatcaaccctacaggaaccgtcctcttgcagctggagaatacgatgcagacctcactgaaggacctcctg

SEQ ID NO: 586 - protein, 398 aa, Artificial Sequence
  variant of human alpha-galactosidase A
LDNGLARTPPMGWLHWERFMCNLDCQEEPDSCISEKLFEEMAERMVTEGWKNAGYEYLCIDDCWMAPQRDSEGRLQADPQRFPHGIRQLANHVHSKGLKLGIYADVGNKTCAGFPGSFGYYDIDAQTFADWGVDLLKFDGCYCDSLENLADGYKHMSLALNRTGRPIVYSCEWPLYMWPFQKPNYTEIRQYCNHWRNFADIDDSWASIKSILDWTSFNQERIVDVAGPGGWNDPDMLVIGNFGLSWDQQVTQMALWAIMAGPLFMSNDLRAISPQAKALLQDKDVIAINQDPLGKQGYQLRQGDNFEVWERPLSGLAWAVAIINRQEIGGPRSYTIPVASLGKGVACNPACFITQLLPVKRKLGFYEATSRLRSHINPTGTVLLQLENTMQTSLKDLL

SEQ ID NO: 587 - DNA, 1194 bp, Artificial Sequence
  variant of human alpha-galactosidase A
ctggataatggattggctagaacacctcctatggggtggcttcactgggagaggttcatgtgcaacctggactgtcaggaagaaccagacagctgcatctccgagaagctctttgaggaaatggccgaacgaatggtgactgagggctggaaagatgcaggttacgagtatctgtgtattgacgattgctggatggccccacaacgggattctgagggaagacttcaggctgatccgcagcgcttccctcatggcataaggcagctggcaaactacgtccacagtaaggggctcaaattgggaatctacgcggacgtgggcaataagacctgtgccggttttccgggatcattcgggtattatgacattgacgcccaaacgtttgctgattggggcgttgacctgctgaaattcgatggttgctactgtgacagcctcgaaaacctggcagacggctacaagcatatgtctctcgccctgaatagaaccggtcggtcaatcgtatattcctgcgagtggcctctttacatgtggccatttcagaaaccgaactacacagaaattcgccagtattgcaatcattggaggaacttcgctgatatcgatgactcatggaagtccataaagagcatcttggactggaccagtcggaatcaggagcgaattgtggatgtcgcaggccctggaggatggaacgatccagacatgctggtgatcggcaattttggcctctcttgggaccagcaggttacccaaatggctctgtgggcaattatggccggtcctcttttcatgagcaacgatctgcgccatatctcaccacaggcaaaggccctgctccaagacaaagatgtgatagccatcaatcaggacccgttgggaaagcagggctaccagctgagaaaaggcgacaactttgaggtctgggaaaggcctttgagtggactcgcgtgggctgtggccataattaatcggcaagagatcggaggtccacgctcctatacaattcctgtagcatctcttggcaagggcgttgcctgtaacccagcttgcttcatcactcagcttctgccggtgaagagaaaactgggtttctacgaagctaccagcaggctccgatcccacatcaaccctacaggaaccgtcctcttgcagctggagaatacgatgcagacttcactgaaggacctcctg

SEQ ID NO: 588 - protein, 398 aa, Artificial Sequence
  variant of human alpha-galactosidase A
LDNGLARTPPMGWLHWERFMCNLDCQEEPDSCISEKLFEEMAERMVTEGWKDAGYEYLCIDDCWMAPQRDSEGRLQADPQRFPHGIRQLANYVHSKGLKLGIYADVGNKTCAGFPGSFGYYDIDAQTFADWGVDLLKFDGCYCDSLENLADGYKHMSLALNRTGRSIVYSCEWPLYMWPFQKPNYTEIRQYCNHWRNFADIDDSWKSIKSILDWTSRNQERIVDVAGPGGWNDPDMLVIGNFGLSWDQQVTQMALWAIMAGPLFMSNDLRHISPQAKALLQDKDVIAINQDPLGKQGYQLRKGDNFEVWERPLSGLAWAVAIINRQEIGGPRSYTIPVASLGKGVACNPACFITQLLPVKRKLGFYEATSRLRSHINPTGTVLLQLENTMQTSLKDLL

SEQ ID NO: 589 - DNA, 1194 bp, Artificial Sequence
  variant of human alpha-galactosidase A
ctggataatggattggctagaacacctaccatggggtggcttcactgggagaggttcatgtgcaacctggactgtcaggaagaaccagacagctgcatctccgagaagctctttgaggaaatggccgaacgaatggtgactgagggctggaaagatgcaggttacgagtatctgtgtattgacgattgctggatggccccacaacgggattctgagggaagacttcaggctgatccgcagcgcttccctcatggcataaggcagctggcaaaccacgtccacagtaaggggctcaaattgggaatctacgcggacgtgggcaataagacctgtgccggttttccgggatcattcgggtattatgacattgacgcccaaacgtttgctgattggggcgttgacctgctgaaattcgatggttgctactgtgacagcctcgaaaacctggcagacggctacaagcatatgtctctcgccctgaatagaaccggtcggccaatcgtatattcctgcgagtggcctctttacatgtggccatttcagaaaccgaactacacagaaattcgccagtattgcaatcattggaggaacttcgctgatatcgatgactcatgggcctccataaagagcatcttggactggaccagtcggaatcaggagcgaattgtggatgtcgcaggccctggaggatggaacgatccagacatgctggtgatcggcaattttggcctctcttgggaccagcaggttacccaaatggctctgtgggcaattatggccgcccctcttttcatgagcaacgatctgcgcgcgatctcaccacaggcaaaggccctgctccaagacaaagatgtgatagccatcaatcaggacccgttgggaaagcagggctaccagctgagaaaaggcgacaactttgaggtctgggaaaggcctttgagtggagatgcgtgggctgtggccattattaatcggcaagagatcggaggtccacgctcctatacaattgctgtagcatctcttggcaagggcgttgcctgtaacccagcttgcttcatcactcagcttctgccggtgaagagaaaactgggtttctacgaagcaaccagcaggctccgatcccacatcaaccctacaggaaccgtcctcttgcagctggagaatacgatgcagatgtcactgaaggacctcctg

SEQ ID NO: 590 - protein, 398 aa, Artificial Sequence
  variant of human alpha-galactosidase A
LDNGLARTPTMGWLHWERFMCNLDCQEEPDSCISEKLFEEMAERMVTEGWKDAGYEYLCIDDCWMAPQRDSEGRLQADPQRFPHGIRQLANHVHSKGLKLGIYADVGNKTCAGFPGSFGYYDIDAQTFADWGVDLLKFDGCYCDSLENLADGYKHMSLALNRTGRPIVYSCEWPLYMWPFQKPNYTEIRQYCNHWRNFADIDDSWASIKSILDWTSRNQERIVDVAGPGGWNDPDMLVIGNFGLSWDQQVTQMALWAIMAAPLFMSNDLRAISPQAKALLQDKDVIAINQDPLGKQGYQLRKGDNFEVWERPLSGDAWAVAIINRQEIGGPRSYTIAVASLGKGVACNPACFITQLLPVKRKLGFYEATSRLRSHINPTGTVLLQLENTMQMSLKDLL

SEQ ID NO: 591 - DNA, 1194 bp, Artificial Sequence
  variant of human alpha-galactosidase A
ctggataatggattggctagaacacctaccatggggtggcttcactgggagaggttcatgtgcaacctggactgtcaggaagaaccagacagctgcatctccgagatgctctttgaagaaatggccgaacggatggtgaccgagggctggaaagatgcaggttacgagtatctgtgtattgacgattgctggatggccccacaacgggattctgagggaagacttcaggctgatccgcagcgcttccctcatggcataaggcagctggcaaactacgtccacagtaaggggctcaaattgggaatctacgcggacgtgggcaataagacctgtgccggttttccgggatcattcgggtattatgacattgacgcccaaacgtttgctgattggggcgttgacctgctgaaattcgatggttgctactgtgacagcctcgaaaacctggcagacggctacaagcatatgtctctcgccctgaatagaaccggtcggtcaatcgtatattcctgcgagtggcctctttacatgtggccatttcagaaaccgaactacacagaaattcgccagtattgcaatcattggaggaacttcgctgatatcgatgactcatgggcctccataaagagcatcttggactggaccagtcggaatcaggagcgaattgtggatgtcgcaggccctggaggatggaacgatccagacatgctggtgatcggcaattttggcctctcttggaatcagcaggttacccaaatggctctgtgggcaattatggccgcccctcttttcatgagcaacgatctgcgcgctatctcaccacaggcaaaggccctgctccaagacaaagatgtgatagccatcaatcaggacccgttgggaaagcagggctaccagctgagaaaaggcgacaactttgaggtctgggaaaggcctttgagtggactcgcgtgggctgtggccataattaatcggcaagagatcggaggtccacgctcctatacaattcctgtagcatctcttggcaagggcgttgcctgtaacccagcttgcttcatcactcagcttctgccggtgaagagaaaactgggtttctacgaagctaccagcaggctccgatcccacatcaaccctacaggaaccgtcctcttgcagctggagaatacgatgcagatgtcactgaaggacctcctg

SEQ ID NO: 592 - protein, 398 aa, Artificial Sequence
  variant of human alpha-galactosidase A
LDNGLARTPTMGWLHWERFMCNLDCQEEPDSCISEMLFEEMAERMVTEGWKDAGYEYLCIDDCWMAPQRDSEGRLQADPQRFPHGIRQLANYVHSKGLKLGIYADVGNKTCAGFPGSFGYYDIDAQTFADWGVDLLKFDGCYCDSLENLADGYKHMSLALNRTGRSIVYSCEWPLYMWPFQKPNYTEIRQYCNHWRNFADIDDSWASIKSILDWTSRNQERIVDVAGPGGWNDPDMLVIGNFGLSWNQQVTQMALWAIMAAPLFMSNDLRAISPQAKALLQDKDVIAINQDPLGKQGYQLRKGDNFEVWERPLSGLAWAVAIINRQEIGGPRSYTIPVASLGKGVACNPACFITQLLPVKRKLGFYEATSRLRSHINPTGTVLLQLENTMQMSLKDLL

SEQ ID NO: 593 - DNA, 1194 bp, Artificial Sequence
  variant of human alpha-galactosidase A
ctggataatggattggctagaacacctcccatggggtggcttcactgggagaggttcatgtgcaacctggactgtcaggaagaaccagacagctgcatctccgagaagctctttgaagaaatggccgaacggatggtgaccgagggctggaaagatgcaggttacgagtatctgtgtattgacgattgctggatggccccacaacgggattctgagggaagacttcaggctgatccgcagcgcttccctcatggcataaggcagctggcaaactacgtccacagtaaggggctcaaattgggaatctacgcggacgtgggcaataagacctgtgccggttttccgggatcattcgggtattatgacattgacgcccaaacgtttgctgattggggcgttgacctgctgaaattcgatggttgctactgtgacagcctcgaaaacctggcagacggctacaagcatatgtctctcgccctgaatagaaccggtcggccaatcgtatattcctgcgagtggcctctttacatgtggccatttcagaaaccgaactacacagaaattcgccagtattgcaatcattggaggaacttcgctgatatcgatgactcatgggcctccataaagagcatcttggactggaccagttttaatcaggagcgaattgtggatgtcgcaggccctggaggatggaacgatccagacatgctggtgatcggcaattttggcctctcttgggaccagcaggttacccaaatggctctgtgggcaattatggccggccctcttttcatgagcaacgatctgcgccatatctcaccacaggcaaaggccctgctccaagacaaagatgtgatagccatcaatcaggacccgttgggaaagcagggctaccagctgagaaagggcgacaactttgaggtctgggaaaggcctttgagtggagatgcgtgggctgtggccattattaatcggcaagagatcggaggtccacgctcctatacaattgctgtagcatctcttggcaagggcgttgcctgtaacccagcttgcttcatcactcagcttctgccggtgaagagaaaactgggtttctacgaagctaccagcaggctccgatcccacatcaaccctacaggaaccgtcctcttgcagctggagaatacgatgcagacctcactgaaggacctcctg

SEQ ID NO: 594 - protein, 398 aa, Artificial Sequence
  variant of human alpha-galactosidase A
LDNGLARTPPMGWLHWERFMCNLDCQEEPDSCISEKLFEEMAERMVTEGWKDAGYEYLCIDDCWMAPQRDSEGRLQADPQRFPHGIRQLANYVHSKGLKLGIYADVGNKTCAGFPGSFGYYDIDAQTFADWGVDLLKFDGCYCDSLENLADGYKHMSLALNRTGRPIVYSCEWPLYMWPFQKPNYTEIRQYCNHWRNFADIDDSWASIKSILDWTSFNQERIVDVAGPGGWNDPDMLVIGNFGLSWDQQVTQMALWAIMAGPLFMSNDLRHISPQAKALLQDKDVIAINQDPLGKQGYQLRKGDNFEVWERPLSGDAWAVAIINRQEIGGPRSYTIAVASLGKGVACNPACFITQLLPVKRKLGFYEATSRLRSHINPTGTVLLQLENTMQTSLKDLL

SEQ ID NO: 595 - DNA, 1194 bp, Artificial Sequence
  variant of human alpha-galactosidase A
ctggataatggattggctagaacacctaccatggggtggcttcactgggagaggttcatgtgcaacctggactgtcaggaagaaccagacagctgcatctccgagaagctctttgaggaaatggccgaacgaatggtgactgagggctggaaagatgcaggttacgagtatctgtgtattgacgattgctggatggccccacaacgggattctgagggaagacttcaggctgatccgcagcgcttccctcatggcataaggcagctggcaaaccacgtccacagtaaggggctcaaattgggaatctacgcggacgtgggcaataagacctgtgccggttttccgggatcattcgggtattatgacattgacgcccaaacgtttgctgattggggcgttgacctgctgaaattcgatggttgctactgtgacagcctcgaaaacctggcagacggctacaagcatatgtctctcgccctgaatagaaccggtcggccaatcgtatattcctgcgagtggcctctttacatgtggccatttcagaaaccgaactacacagaaattcgccagtattgcaatcattggaggaacttcgctgatatcgatgactcatgggcctccataaagagcatcttggactggaccagtcggaatcaggagcgaattgtggatgtcgcaggccctggaggatggaacgatccagacatgctggtgatcggcaattttggcctctcttgggaccagcaggttacccaaatggctctgtgggcaattatggccggtcctcttttcatgagcaacgatctgcgcgcgatctcaccacaggcaaaggccctgctccaagacaaagatgtgatagccatcaatcaggacccgttgggaaagcagggctaccagctgagaaaaggcgacaactttgaggtctgggaaaggcctttgagtggagatgcgtgggctgtggccataattaatcggcaagagatcggaggtccacgctcctatacaattcctgtagcatctcttggcaagggcgttgcctgtaacccagcttgcttcatcactcagcttctgccggtgaagagaaaactgggtttctacgaatggaccagcaggctccgatcccacatcaaccctacaggaaccgtcctcttgcagctggagaatacgatgcagacttcactgaaggacctcctg

SEQ ID NO: 596 - protein, 398 aa, Artificial Sequence
  variant of human alpha-galactosidase A
LDNGLARTPTMGWLHWERFMCNLDCQEEPDSCISEKLFEEMAERMVTEGWKDAGYEYLCIDDCWMAPQRDSEGRLQADPQRFPHGIRQLANHVHSKGLKLGIYADVGNKTCAGFPGSFGYYDIDAQTFADWGVDLLKFDGCYCDSLENLADGYKHMSLALNRTGRPIVYSCEWPLYMWPFQKPNYTEIRQYCNHWRNFADIDDSWASIKSILDWTSRNQERIVDVAGPGGWNDPDMLVIGNFGLSWDQQVTQMALWAIMAGPLFMSNDLRAISPQAKALLQDKDVIAINQDPLGKQGYQLRKGDNFEVWERPLSGDAWAVAIINRQEIGGPRSYTIPVASLGKGVACNPACFITQLLPVKRKLGFYEWTSRLRSHINPTGTVLLQLENTMQTSLKDLL

SEQ ID NO: 597 - DNA, 1194 bp, Artificial Sequence
  variant of human alpha-galactosidase A
ctggataatggattggctagaacacctaccatggggtggcttcactgggagaggttcatgtgcaacctggactgtcaggaagaaccagacagctgcatctccgagaagctctttatggaaatggccgaacggatggtgactgagggctggaaagatgcaggttacgagtatctgtgtattgacgattgctggatggccccacaacgggattctgagggaagacttcaggctgatccgcagcgcttccctcatggcataaggcagctggcaaactacgtccacagtaaggggctcaaattgggaatctacgcggacgtgggcaataagacctgtgccggttttccgggatcattcgggtattatgacattgacgcccaaacgtttgctgattggggcgttgacctgctgaaattcgatggttgctactgtgacagcctcgaaaacctggcagacggctacaagcatatgtctctcgccctgaatagaaccggtcggtcaatcgtatattcctgcgagtggcctctttacatgtggccatttcagaaaccgaactacacagaaattcgccagtattgcaatcattggaggaacttcgctgatatcgatgactcatgggcctccataaagagcatcttggactggaccagttttaatcaggagcgaattgtggatgtcgcaggccctggaggatggaacgatccagacatgctggtgatcggcaattttggcctctcttggaatcagcaggttacccaaatggctctgtgggcaattatggccggtcctcttttcatgagcaacgatctgcgccatatctcaccacaggcaaaggccctgctccaagacaaagatgtgatagccatcaatcaggacccgttgggaaagcagggctaccagctgagaaaaggcgacaactttgaggtctgggaaaggcctttgagtggagatgcgtgggctgtggccattattaatcggcaagagatcggaggtccacgctcctatacaattcctgtagcatctcttggcaagggcgttgcctgtaacccagcttgcttcatcactcagcttctgccggtgaagagaaaactgggtttctacgaagcaaccagcaggctccgatcccacatcaaccctacaggaaccgtcctcttgcagctggagaatacgatgcagacctcactgaaggacctcctg

SEQ ID NO: 598 - protein, 398 aa, Artificial Sequence
  variant of human alpha-galactosidase A
LDNGLARTPTMGWLHWERFMCNLDCQEEPDSCISEKLFMEMAERMVTEGWKDAGYEYLCIDDCWMAPQRDSEGRLQADPQRFPHGIRQLANYVHSKGLKLGIYADVGNKTCAGFPGSFGYYDIDAQTFADWGVDLLKFDGCYCDSLENLADGYKHMSLALNRTGRSIVYSCEWPLYMWPFQKPNYTEIRQYCNHWRNFADIDDSWASIKSILDWTSFNQERIVDVAGPGGWNDPDMLVIGNFGLSWNQQVTQMALWAIMAGPLFMSNDLRHISPQAKALLQDKDVIAINQDPLGKQGYQLRKGDNFEVWERPLSGDAWAVAIINRQEIGGPRSYTIPVASLGKGVACNPACFITQLLPVKRKLGFYEATSRLRSHINPTGTVLLQLENTMQTSLKDLL

SEQ ID NO: 599 - DNA, 1194 bp, Artificial Sequence
  variant of human alpha-galactosidase A
ctggataatggattggctagaacacctaccatggggtggcttcactgggagaggttcatgtgcaacctggactgtcaggaagaaccagacagctgcatctccgagaagctctttgaggaaatggccgaactgatggtgtccgagggctggaaagatgcaggttacgagtatctgtgtattgacgattgctggatggccccacaacgggattctgagggaagacttcaggctgatccgcagcgcttccctcatggcataaggcagctggcaaaccacgtccacagtaaggggctcaaattgggaatctacgcggacgtgggcaataagacctgtgccggttttccgggatcattcgggtattatgacattgacgcccaaacgtttgctgattggggcgttgacctgctgaaattcgatggttgctactgtgacagcctcgaaaacctggcagacggctacaagcatatgtctctcgccctgaatagaaccggtcggtcaatcgtatattcctgcgagtggcctctttacatgtggccatttcagaaaccgaactacacagaaattcgccagtattgcaatcattggaggaacttcgctgatatcgatgactcatgggcctccataaagagcatcttggactggaccagtcggaatcaggagcgaattgtggatgtcgcaggccctggaggatggaacgatccagacatgctggtgatcggcaattttggcctctcttgggaccagcaggttacccaaatggctctgtgggcaattatggccgcccctcttttcatgagcaacgatctgcgccatatctcaccacaggcaaaggccctgctccaagacaaagatgtgatagccatcaatcaggacccgttgggaaagcagggctaccagctgagaaaaggcgacaactttgaggtctgggaaaggcctttgagtggagatgcgtgggctgtggccattattaatcggcaagagatcggaggtccacgctcctatacaattcctgtagcatctcttggcaagggcgttgcctgtaacccagcttgcttcatcactcagcttctgccggtgaagagaaaactgggtttctacgaagctaccagcaggctccgatcccacatcaaccctacaggaaccgtcctcttgcagctggagaatacgatgcagacttcactgaaggacctcctg

SEQ ID NO: 600 - protein, 398 aa, Artificial Sequence
  variant of human alpha-galactosidase A
LDNGLARTPTMGWLHWERFMCNLDCQEEPDSCISEKLFEEMAELMVSEGWKDAGYEYLCIDDCWMAPQRDSEGRLQADPQRFPHGIRQLANHVHSKGLKLGIYADVGNKTCAGFPGSFGYYDIDAQTFADWGVDLLKFDGCYCDSLENLADGYKHMSLALNRTGRSIVYSCEWPLYMWPFQKPNYTEIRQYCNHWRNFADIDDSWASIKSILDWTSRNQERIVDVAGPGGWNDPDMLVIGNFGLSWDQQVTQMALWAIMAAPLFMSNDLRHISPQAKALLQDKDVIAINQDPLGKQGYQLRKGDNFEVWERPLSGDAWAVAIINRQEIGGPRSYTIPVASLGKGVACNPACFITQLLPVKRKLGFYEATSRLRSHINPTGTVLLQLENTMQTSLKDLL

SEQ ID NO: 601 - DNA, 1194 bp, Artificial Sequence
  variant of human alpha-galactosidase A
ctggataatggattggctagaacacctcccatggggtggcttcactgggagaggttcatgtgcaacctggactgtcaggaagaaccagacagctgcatctccgagaagctctttgaggaaatggccgaactgatggtgaccgagggctggaaagatgcaggttacgagtatctgtgtattgacgattgctggatggccccacaacgggattctgagggaagacttcaggctgatccgcagcgcttccctcatggcataaggcagctggcaaaccacgtccacagtaaggggctcaaattgggaatctacgcggacgtgggcaataagacctgtgccggttttccgggatcattcgggtattatgacattgacgcccaaacgtttgctgattggggcgttgacctgctgaaattcgatggttgctactgtgacagcctcgaaaacctggcagacggctacaagcatatgtctctcgccctgaatagaaccggtcggccaatcgtatattcctgcgagtggcctctttacatgtggccatttcagaaaccgaactacacagaaattcgccagtattgcaatcattggaggaacttcgctgatatcgatgactcatgggcctccataaagagcatcttggactggaccagtcggaatcaggagcgaattgtggatgtcgcaggccctggaggatggaacgatccagacatgctggtgatcggcaattttggcctctcttgggaccagcaggttacccaaatggctctgtgggcaattatggccggtcctcttttcatgagcaacgatctgcgcgctatctcaccacaggcaaaggccctgctccaagacaaagatgtgatagccatcaatcaggacccgttgggaaagcagggctaccagctgagaaaaggcgacaactttgaggtctgggaaaggcctttgagtggactcgcgtgggctgtggccatgattaatcggcaagagatcggaggtccacgctcctatacaattcctgtagcatctcttggcaagggcgttgcctgtaacccagcttgcttcatcactcagcttctgccggtgaagagaaaactgggtttctacgaagctaccagcaggctccgatcccacatcaaccctacaggaaccgtcctcttgcagctggagaatacgatgcagatgtcactgaaggacctcctg

SEQ ID NO: 602 - protein, 398 aa, Artificial Sequence
  variant of human alpha-galactosidase A
LDNGLARTPPMGWLHWERFMCNLDCQEEPDSCISEKLFEEMAELMVTEGWKDAGYEYLCIDDCWMAPQRDSEGRLQADPQRFPHGIRQLANHVHSKGLKLGIYADVGNKTCAGFPGSFGYYDIDAQTFADWGVDLLKFDGCYCDSLENLADGYKHMSLALNRTGRPIVYSCEWPLYMWPFQKPNYTEIRQYCNHWRNFADIDDSWASIKSILDWTSRNQERIVDVAGPGGWNDPDMLVIGNFGLSWDQQVTQMALWAIMAGPLFMSNDLRAISPQAKALLQDKDVIAINQDPLGKQGYQLRKGDNFEVWERPLSGLAWAVAMINRQEIGGPRSYTIPVASLGKGVACNPACFITQLLPVKRKLGFYEATSRLRSHINPTGTVLLQLENTMQMSLKDLL

SEQ ID NO: 603 - DNA, 1194 bp, Artificial Sequence
  variant of human alpha-galactosidase A
ctggataatggattggctagaacacctcccatggggtggcttcactgggagaggttcatgtgcaacctggactgtcaggaagaaccagacagctgcatctccgagaagctctttatggaaatggccgaactgatggtgtccgagggctggaaagatgcaggttacgagtatctgtgtattgacgattgctggatggccccacaacgggattctgagggaagacttcaggctgatccgcagcgcttccctcatggcataaggcagctggcaaaccacgtccacagtaaggggctcaaattgggaatctacgcggacgtgggcaataagacctgtgccggttttccgggatcattcgggtattatgacattgacgcccaaacgtttgctgattggggcgttgacctgctgaaattcgatggttgctactgtgacagcctcgaaaacctggcagacggctacaagcatatgtctctcgccctgaatagaaccggtcggccaatcgtatattcctgcgagtggcctctttacatgtggccatttcagaaaccgaactacacagaaattcgccagtattgcaatcattggaggaacttcgctgatatcgatgactcatggaagtccataaagagcatcttggactggaccagtcggaatcaggagcgaattgtggatgtcgcaggccctggaggatggaacgatccagacatgctggtgatcggcaattttggcctctcttgggatcagcaggttacccaaatggctctgtgggcaattatggccggtcctcttttcatgagcaacgatctgcgcgcgatctcaccacaggcaaaggccctgctccaagacaaagatgtgatagccatcaatcaggacccgttgggaaagcagggctaccagctgagaaagggcgacaactttgaggtctgggaaaggcctttgagtggagatgcgtgggctgtggccattattaatcggcaagagatcggaggtccacgctcctatacaattgctgtagcatctcttggcaagggcgttgcctgtaacccagcttgcttcatcactcagcttctgccggtgaagagaaaactgggtttctacgaatggaccagcaggctccgatcccacatcaaccctacaggaaccgtcctcttgcagctggagaatacgatgcagatgtcactgaaggacctcctg

SEQ ID NO: 604 - protein, 398 aa, Artificial Sequence
  variant of human alpha-galactosidase A
LDNGLARTPPMGWLHWERFMCNLDCQEEPDSCISEKLFMEMAELMVSEGWKDAGYEYLCIDDCWMAPQRDSEGRLQADPQRFPHGIRQLANHVHSKGLKLGIYADVGNKTCAGFPGSFGYYDIDAQTFADWGVDLLKFDGCYCDSLENLADGYKHMSLALNRTGRPIVYSCEWPLYMWPFQKPNYTEIRQYCNHWRNFADIDDSWKSIKSILDWTSRNQERIVDVAGPGGWNDPDMLVIGNFGLSWDQQVTQMALWAIMAGPLFMSNDLRAISPQAKALLQDKDVIAINQDPLGKQGYQLRKGDNFEVWERPLSGDAWAVAIINRQEIGGPRSYTIAVASLGKGVACNPACFITQLLPVKRKLGFYEWTSRLRSHINPTGTVLLQLENTMQMSLKDLL

SEQ ID NO: 605 - DNA, 1194 bp, Artificial Sequence
  variant of human alpha-galactosidase A
ctggataatggattggctagaacacctaccatggggtggcttcactgggagaggttcatgtgcaacctggactgtcaggaagaaccagacagctgcatctccgagaagctctttgaggaaatggccgaactgatggtgaccgagggctggaaagatgcaggttacgagtatctgtgtattgacgattgctggatggccccacaacgggattctgagggaagacttcaggctgatccgcagcgcttccctcatggcataaggcagctggcaaaccacgtccacagtaaggggctcaaattgggaatctacgcggacgtgggcaataagacctgtgccggttttccgggatcattcgggtattatgacattgacgcccaaacgtttgctgattggggcgttgacctgctgaaattcgatggttgctactgtgacagcctcgaaaacctggcagacggctacaagcatatgtctctcgccctgaatagaaccggtcggccaatcgtatattcctgcgagtggcctctttacatgtggccatttcagaaaccgaactacacagaaattcgccagtattgcaatcattggaggaacttcgctgatatcgatgactcatggaagtccataaagagcatcttggactggaccagtcggaatcaggagcgaattgtggatgtcgcaggccctggaggatggaacgatccagacatgctggtgatcggcaattttggcctctcttgggaccagcaggttacccaaatggctctgtgggcaattatggccggtcctcttttcatgagcaacgatctgcgcgcgatctcaccacaggcaaaggccctgctccaagacaaagatgtgatagccatcaatcaggacccgttgggaaagcagggctaccagctgagaaagggcgacaactttgaggtctgggaaaggcctttgagtggactcgcgtgggctgtggccatgattaatcggcaagagatcggaggtccacgctcctatacaattcctgtagcatctcttggcaagggcgttgcctgtaacccagcttgcttcatcactcagcttctgccggtgaagagaaaactgggtttctacgaagctaccagcaggctccgatcccacatcaaccctacaggaaccgtcctcttgcagctggagaatacgatgcagacttcactgaaggacctcctg

SEQ ID NO: 606 - protein, 398 aa, Artificial Sequence
  variant of human alpha-galactosidase A
LDNGLARTPTMGWLHWERFMCNLDCQEEPDSCISEKLFEEMAELMVTEGWKDAGYEYLCIDDCWMAPQRDSEGRLQADPQRFPHGIRQLANHVHSKGLKLGIYADVGNKTCAGFPGSFGYYDIDAQTFADWGVDLLKFDGCYCDSLENLADGYKHMSLALNRTGRPIVYSCEWPLYMWPFQKPNYTEIRQYCNHWRNFADIDDSWKSIKSILDWTSRNQERIVDVAGPGGWNDPDMLVIGNFGLSWDQQVTQMALWAIMAGPLFMSNDLRAISPQAKALLQDKDVIAINQDPLGKQGYQLRKGDNFEVWERPLSGLAWAVAMINRQEIGGPRSYTIPVASLGKGVACNPACFITQLLPVKRKLGFYEATSRLRSHINPTGTVLLQLENTMQTSLKDLL

SEQ ID NO: 607 - DNA, 1194 bp, Artificial Sequence
  variant of human alpha-galactosidase A
ctggataatggattggctagaacacctcctatggggtggcttcactgggagaggttcatgtgcaacctggactgtcaggaagaaccagacagctgcatctccgagaagctctttatggaaatggccgaactgatggtgaccgagggctggaaagatgcaggttacgagtatctgtgtattgacgattgctggatggccccacaacgggattctgagggaagacttcaggctgatccgcagcgcttccctcatggcataaggcagctggcaaaccacgtccacagtaaggggctcaaattgggaatctacgcggacgtgggcaataagacctgtgccggttttccgggatcattcgggtattatgacattgacgcccaaacgtttgctgattggggcgttgacctgctgaaattcgatggttgctactgtgacagcctcgaaaacctggcagacggctacaagcatatgtctctcgccctgaatagaaccggtcggtcaatcgtatattcctgcgagtggcctctttacatgtggccatttcagaaaccgaactacacagaaattcgccagtattgcaatcattggaggaacttcgctgatatcgatgactcatgggcctccataaagagcatcttggactggaccagtcggaatcaggagcgaattgtggatgtcgcaggccctggaggatggaacgatccagacatgctggtgatcggcaattttggcctctcttgggaccagcaggttacccaaatggctctgtgggcaattatggccggccctcttttcatgagcaacgatctgcgccatatctcaccacaggcaaaggccctgctccaagacaaagatgtgatagccatcaatcaggacccgttgggaaagcagggctaccagctgagaaaaggcgacaactttgaggtctgggaaaggcctttgagtggagatgcgtgggctgtggccattattaatcggcaagagatcggaggtccacgctcctatacaattcctgtagcatctcttggcaagggcgttgcctgtaacccagcttgcttcatcactcagcttctgccggtgaagagaaaactgggtttctacgaagctaccagcaggctccgatcccacatcaaccctacaggaaccgtcctcttgcagctggagaatacgatgcagacttcactgaaggacctcctg

SEQ ID NO: 608 - protein, 398 aa, Artificial Sequence
  variant of human alpha-galactosidase A
LDNGLARTPPMGWLHWERFMCNLDCQEEPDSCISEKLFMEMAELMVTEGWKDAGYEYLCIDDCWMAPQRDSEGRLQADPQRFPHGIRQLANHVHSKGLKLGIYADVGNKTCAGFPGSFGYYDIDAQTFADWGVDLLKFDGCYCDSLENLADGYKHMSLALNRTGRSIVYSCEWPLYMWPFQKPNYTEIRQYCNHWRNFADIDDSWASIKSILDWTSRNQERIVDVAGPGGWNDPDMLVIGNFGLSWDQQVTQMALWAIMAGPLFMSNDLRHISPQAKALLQDKDVIAINQDPLGKQGYQLRKGDNFEVWERPLSGDAWAVAIINRQEIGGPRSYTIPVASLGKGVACNPACFITQLLPVKRKLGFYEATSRLRSHINPTGTVLLQLENTMQTSLKDLL

SEQ ID NO: 609 - DNA, 1194 bp, Artificial Sequence
  variant of human alpha-galactosidase A
ctggataatggattggctagaacacctcctatggggtggcttcactgggagaggttcatgtgcaacctggactgtcaggaagaaccagacagctgcatctccgagaagctctttatggaaatggccgaacggatggtgtccgagggctggaaagatgcaggttacgagtatctgtgtattgacgattgctggatggccccacaacgggattctgagggaagacttcaggctgatccgcagcgcttccctcatggcataaggcagctggcaaaccacgtccacagtaaggggctcaaattgggaatctacgcggacgtgggcaataagacctgtgccggttttccgggatcattcgggtattatgacattgacgcccaaacgtttgctgattggggcgttgacctgctgaaattcgatggttgctactgtgacagcctcgaaaacctggcagacggctacaagcatatgtctctcgccctgaatagaaccggtcggccaatcgtatattcctgcgagtggcctctttacatgtggccatttcagaaaccgaactacacagaaattcgccagtattgcaatcattggaggaacttcgctgatatcgatgactcatgggcctccataaagagcatcttggactggaccagtcggaatcaggagcgaattgtggatgtcgcaggccctggaggatggaacgatccagacatgctggtgatcggcaattttggcctctcttggaatcagcaggttacccaaatggctctgtgggcaattatggccggtcctcttttcatgagcaacgatctgcgcgcgatctcaccacaggcaaaggccctgctccaagacaaagatgtgatagccatcaatcaggacccgttgggaaagcagggctaccagctgagaaaaggcgacaactttgaggtctgggaaaggcctttgagtggagatgcgtgggctgtggccattattaatcggcaagagatcggaggtccacgctcctatacaattcctgtagcatctcttggcaagggcgttgcctgtaacccagcttgcttcatcactcagcttctgccggtgaagagaaaactgggtttctacgaagctaccagcaggctccgatcccacatcaaccctacaggaaccgtcctcttgcagctggagaatacgatgcagacttcactgaaggacctcctg

SEQ ID NO: 610 - protein, 398 aa, Artificial Sequence
  variant of human alpha-galactosidase A
LDNGLARTPPMGWLHWERFMCNLDCQEEPDSCISEKLFMEMAERMVSEGWKDAGYEYLCIDDCWMAPQRDSEGRLQADPQRFPHGIRQLANHVHSKGLKLGIYADVGNKTCAGFPGSFGYYDIDAQTFADWGVDLLKFDGCYCDSLENLADGYKHMSLALNRTGRPIVYSCEWPLYMWPFQKPNYTEIRQYCNHWRNFADIDDSWASIKSILDWTSRNQERIVDVAGPGGWNDPDMLVIGNFGLSWNQQVTQMALWAIMAGPLFMSNDLRAISPQAKALLQDKDVIAINQDPLGKQGYQLRKGDNFEVWERPLSGDAWAVAIINRQEIGGPRSYTIPVASLGKGVACNPACFITQLLPVKRKLGFYEATSRLRSHINPTGTVLLQLENTMQTSLKDLL

SEQ ID NO: 611 - DNA, 1194 bp, Artificial Sequence
  variant of human alpha-galactosidase A
ctggataatggattggctagaacacctaccatggggtggcttcactgggagaggttcatgtgcaacctggactgtcaggaagaaccagacagctgcatctccgagaagctctttgaggaaatggccgaacggatggtgaccgagggctggaaagatgcaggttacgagtatctgtgtattgacgattgctggatggccccacaacgggattctgagggaagacttcaggctgatccgcagcgcttccctcatggcataaggcagctggcaaaccacgtccacagtaaggggctcaaattgggaatctacgcggacgtgggcaataagacctgtgccggttttccgggatcattcgggtattatgacattgacgcccaaacgtttgctgattggggcgttgacctgctgaaattcgatggttgctactgtgacagcctcgaaaacctggcagacggctacaagcatatgtctctcgccctgaatagaaccggtcggccaatcgtatattcctgcgagtggcctctttacatgtggccatttcagaaaccgaactacacagaaattcgccagtattgcaatcattggaggaacttcgctgatatcgatgactcatggaagtccataaagagcatcttggactggaccagtcggaatcaggagcgaattgtggatgtcgcaggccctggaggatggaacgatccagacatgctggtgatcggcaattttggcctctcttggaatcagcaggttacccaaatggctctgtgggcaattatggccgcccctcttttcatgagcaacgatctgcgcgcgatctcaccacaggcaaaggccctgctccaagacaaagatgtgatagccatcaatcaggacccgttgggaaagcagggctaccagctgagaaaaggcgacaactttgaggtctgggaaaggcctttgagtggagatgcgtgggctgtggccattattaatcggcaagagatcggaggtccacgctcctatacaattcctgtagcatctcttggcaagggcgttgcctgtaacccagcttgcttcatcactcagcttctgccggtgaagagaaaactgggtttctacgaagctaccagcaggctccgatcccacatcaaccctacaggaaccgtcctcttgcagctggagaatacgatgcagacttcactgaaggacctcctg

SEQ ID NO: 612 - protein, 398 aa, Artificial Sequence
  variant of human alpha-galactosidase A
LDNGLARTPTMGWLHWERFMCNLDCQEEPDSCISEKLFEEMAERMVTEGWKDAGYEYLCIDDCWMAPQRDSEGRLQADPQRFPHGIRQLANHVHSKGLKLGIYADVGNKTCAGFPGSFGYYDIDAQTFADWGVDLLKFDGCYCDSLENLADGYKHMSLALNRTGRPIVYSCEWPLYMWPFQKPNYTEIRQYCNHWRNFADIDDSWKSIKSILDWTSRNQERIVDVAGPGGWNDPDMLVIGNFGLSWNQQVTQMALWAIMAAPLFMSNDLRAISPQAKALLQDKDVIAINQDPLGKQGYQLRKGDNFEVWERPLSGDAWAVAIINRQEIGGPRSYTIPVASLGKGVACNPACFITQLLPVKRKLGFYEATSRLRSHINPTGTVLLQLENTMQTSLKDLL

SEQ ID NO: 613 - DNA, 1194 bp, Artificial Sequence
  variant of human alpha-galactosidase A
ctggataatggattggctagaacacctaccatggggtggcttcactgggagaggttcatgtgcaacctggactgtcaggaagaaccagacagctgcatctccgagaagctctttatggaaatggccgaactgatggtgaccgagggctggaaagatgcaggttacgagtatctgtgtattgacgattgctggatggccccacaacgggattctgagggaagacttcaggctgatccgcagcgcttccctcatggcataaggcagctggcaaactacgtccacagtaaggggctcaaattgggaatctacgcggacgtgggcaataagacctgtgccggttttccgggatcattcgggtattatgacattgacgcccaaacgtttgctgattggggcgttgacctgctgaaattcgatggttgctactgtgacagcctcgaaaacctggcagacggctacaagcatatgtctctcgccctgaatagaaccggtcggtcaatcgtatattcctgcgagtggcctctttacatgtggccatttcagaaaccgaactacacagaaattcgccagtattgcaatcattggaggaacttcgctgatatcgatgactcatgggcctccataaagagcatcttggactggaccagtcggaatcaggagcgaattgtggatgtcgcaggccctggaggatggaacgatccagacatgctggtgatcggcaattttggcctctcttgggatcagcaggttacccaaatggctctgtgggcaattatggccggccctcttttcatgagcaacgatctgcgcgcgatctcaccacaggcaaaggccctgctccaagacaaagatgtgatagccatcaatcaggacccgttgggaaagcagggctaccagctgagaaaaggcgacaactttgaggtctgggaaaggcctttgagtggagatgcgtgggctgtggccattattaatcggcaagagatcggaggtccacgctcctatacaattcctgtagcatctcttggcaagggcgttgcctgtaacccagcttgcttcatcactcagcttctgccggtgaagagaaaactgggtttctacgaagctaccagcaggctccgatcccacatcaaccctacaggaaccgtcctcttgcagctggagaatacgatgcagatgtcactgaaggacctcctg

SEQ ID NO: 614 - protein, 398 aa, Artificial Sequence
  variant of human alpha-galactosidase A
LDNGLARTPTMGWLHWERFMCNLDCQEEPDSCISEKLFMEMAELMVTEGWKDAGYEYLCIDDCWMAPQRDSEGRLQADPQRFPHGIRQLANYVHSKGLKLGIYADVGNKTCAGFPGSFGYYDIDAQTFADWGVDLLKFDGCYCDSLENLADGYKHMSLALNRTGRSIVYSCEWPLYMWPFQKPNYTEIRQYCNHWRNFADIDDSWASIKSILDWTSRNQERIVDVAGPGGWNDPDMLVIGNFGLSWDQQVTQMALWAIMAGPLFMSNDLRAISPQAKALLQDKDVIAINQDPLGKQGYQLRKGDNFEVWERPLSGDAWAVAIINRQEIGGPRSYTIPVASLGKGVACNPACFITQLLPVKRKLGFYEATSRLRSHINPTGTVLLQLENTMQMSLKDLL

SEQ ID NO: 615 - DNA, 1194 bp, Artificial Sequence
  variant of human alpha-galactosidase A
ctggataatggattggctagaacacctaccatggggtggcttcactgggagaggttcatgtgcaacctggactgtcaggaagaaccagacagctgcatctccgagaagctctttgaggaaatggccgaactgatggtgaccgagggctggaaagatgcaggttacgagtatctgtgtattgacgattgctggatggccccacaacgggattctgagggaagacttcaggctgatccgcagcgcttccctcatggcataaggcagctggcaaaccacgtccacagtaaggggctcaaattgggaatctacgcggacgtgggcaataagacctgtgccggttttccgggatcattcgggtattatgacattgacgcccaaacgtttgctgattggggcgttgacctgctgaaattcgatggttgctactgtgacagcctcgaaaacctggcagacggctacaagcatatgtctctcgccctgaatagaaccggtcggtcaatcgtatattcctgcgagtggcctctttacatgtggccatttcagaaaccgaactacacagaaattcgccagtattgcaatcattggaggaacttcgctgatatcgatgactcatgggcctccataaagagcatcttggactggaccagtcggaatcaggagcgaattgtggatgtcgcaggccctggaggatggaacgatccagacatgctggtgatcggcaattttggcctctcttgggatcagcaggttacccaaatggctctgtgggcaattatggccggtcctcttttcatgagcaacgatctgcgcgcgatctcaccacaggcaaaggccctgctccaagacaaagatgtgatagccatcaatcaggacccgttgggaaagcagggctaccagctgagacagggcgacaactttgaggtctgggaaaggcctttgagtggagatgcgtgggctgtggccattattaatcggcaagagatcggaggtccacgctcctatacaattcctgtagcatctcttggcaagggcgttgcctgtaacccagcttgcttcatcactcagcttctgccggtgaagagaaaactgggtttctacgaagctaccagcaggctccgatcccacatcaaccctacaggaaccgtcctcttgcagctggagaatacgatgcagacttcactgaaggacctcctg

SEQ ID NO: 616 - protein, 398 aa, Artificial Sequence
  variant of human alpha-galactosidase A
LDNGLARTPTMGWLHWERFMCNLDCQEEPDSCISEKLFEEMAELMVTEGWKDAGYEYLCIDDCWMAPQRDSEGRLQADPQRFPHGIRQLANHVHSKGLKLGIYADVGNKTCAGFPGSFGYYDIDAQTFADWGVDLLKFDGCYCDSLENLADGYKHMSLALNRTGRSIVYSCEWPLYMWPFQKPNYTEIRQYCNHWRNFADIDDSWASIKSILDWTSRNQERIVDVAGPGGWNDPDMLVIGNFGLSWDQQVTQMALWAIMAGPLFMSNDLRAISPQAKALLQDKDVIAINQDPLGKQGYQLRQGDNFEVWERPLSGDAWAVAIINRQEIGGPRSYTIPVASLGKGVACNPACFITQLLPVKRKLGFYEATSRLRSHINPTGTVLLQLENTMQTSLKDLL

SEQ ID NO: 617 - DNA, 1194 bp, Artificial Sequence
  variant of human alpha-galactosidase A
ctggataatggattggctagaacacctaccatggggtggcttcactgggagaggttcatgtgcaacctggactgtcaggaagaaccagacagctgcatctccgagaagctctttgaagaaatggccgaacggatggtgtccgagggctggaaagatgcaggttacgagtatctgtgtattgacgattgctggatggccccacaacgggattctgagggaagacttcaggctgatccgcagcgcttccctcatggcataaggcagctggcaaactacgtccacagtaaggggctcaaattgggaatctacgcggacgtgggcaataagacctgtgccggttttccgggatcattcgggtattatgacattgacgcccaaacgtttgctgattggggcgttgacctgctgaaattcgatggttgctactgtgacagcctcgaaaacctggcagacggctacaagcatatgtctctcgccctgaatagaaccggtcggccaatcgtatattcctgcgagtggcctctttacatgtggccatttcagaaaccgaactacacagaaattcgccagtattgcaatcattggaggaacttcgctgatatcgatgactcatgggcctccataaagagcatcttggactggaccagtcggaatcaggagcgaattgtggatgtcgcaggccctggaggatggaacgatccagacatgctggtgatcggcaattttggcctctcttgggaccagcaggttacccaaatggctctgtgggcaattatggccggccctcttttcatgagcaacgatctgcgccatatctcaccacaggcaaaggccctgctccaagacaaagatgtgatagccatcaatcaggacccgttgggaaagcagggctaccagctgagacagggcgacaactttgaggtctgggaaaggcctttgagtggagatgcgtgggctgtggccataattaatcggcaagagatcggaggtccacgctcctatacaattcctgtagcatctcttggcaagggcgttgcctgtaacccagcttgcttcatcactcagcttctgccggtgaagagaaaactgggtttctacgaagctaccagcaggctccgatcccacatcaaccctacaggaaccgtcctcttgcagctggagaatacgatgcagacttcactgaaggacctcctg

SEQ ID NO: 618 - protein, 398 aa, Artificial Sequence
  variant of human alpha-galactosidase A
LDNGLARTPTMGWLHWERFMCNLDCQEEPDSCISEKLFEEMAERMVSEGWKDAGYEYLCIDDCWMAPQRDSEGRLQADPQRFPHGIRQLANYVHSKGLKLGIYADVGNKTCAGFPGSFGYYDIDAQTFADWGVDLLKFDGCYCDSLENLADGYKHMSLALNRTGRPIVYSCEWPLYMWPFQKPNYTEIRQYCNHWRNFADIDDSWASIKSILDWTSRNQERIVDVAGPGGWNDPDMLVIGNFGLSWDQQVTQMALWAIMAGPLFMSNDLRHISPQAKALLQDKDVIAINQDPLGKQGYQLRQGDNFEVWERPLSGDAWAVAIINRQEIGGPRSYTIPVASLGKGVACNPACFITQLLPVKRKLGFYEATSRLRSHINPTGTVLLQLENTMQTSLKDLL

SEQ ID NO: 619 - DNA, 1194 bp, Artificial Sequence
  variant of human alpha-galactosidase A
ctggataatggattggctagaacacctcccatggggtggcttcactgggagaggttcatgtgcaacctggactgtcaggaagaaccagacagctgcatctccgagaagctctttgaggaaatggccgaactgatggtgtccgagggctggaaagatgcaggttacgagtatctgtgtattgacgattgctggatggccccacaacgggattctgagggaagacttcaggctgatccgcagcgcttccctcatggcataaggcagctggcaaaccacgtccacagtaaggggctcaaattgggaatctacgcggacgtgggcaataagacctgtgccggttttccgggatcattcgggtattatgacattgacgcccaaacgtttgctgattggggcgttgacctgctgaaattcgatggttgctactgtgacagcctcgaaaacctggcagacggctacaagcatatgtctctcgccctgaatagaaccggtcggtcaatcgtatattcctgcgagtggcctctttacatgtggccatttcagaaaccgaactacacagaaattcgccagtattgcaatcattggaggaacttcgctgatatcgatgactcatgggcctccataaagagcatcttggactggaccagtcggaatcaggagcgaattgtggatgtcgcaggccctggaggatggaacgatccagacatgctggtgatcggcaattttggcctctcttgggatcagcaggttacccaaatggctctgtgggcaattatggccggccctcttttcatgagcaacgatctgcgccatatctcaccacaggcaaaggccctgctccaagacaaagatgtgatagccatcaatcaggacccgttgggaaagcagggctaccagctgagaaaaggcgacaactttgaggtctgggaaaggcctttgagtggagatgcgtgggctgtggccataattaatcggcaagagatcggaggtccacgctcctatacaattcctgtagcatctcttggcaagggcgttgcctgtaacccagcttgcttcatcactcagcttctgccggtgaagagaaaactgggtttctacgaagctaccagcaggctccgatcccacatcaaccctacaggaaccgtcctcttgcagctggagaatacgatgcagacttcactgaaggacctcctg

SEQ ID NO: 620 - protein, 398 aa, Artificial Sequence
  variant of human alpha-galactosidase A
LDNGLARTPPMGWLHWERFMCNLDCQEEPDSCISEKLFEEMAELMVSEGWKDAGYEYLCIDDCWMAPQRDSEGRLQADPQRFPHGIRQLANHVHSKGLKLGIYADVGNKTCAGFPGSFGYYDIDAQTFADWGVDLLKFDGCYCDSLENLADGYKHMSLALNRTGRSIVYSCEWPLYMWPFQKPNYTEIRQYCNHWRNFADIDDSWASIKSILDWTSRNQERIVDVAGPGGWNDPDMLVIGNFGLSWDQQVTQMALWAIMAGPLFMSNDLRHISPQAKALLQDKDVIAINQDPLGKQGYQLRKGDNFEVWERPLSGDAWAVAIINRQEIGGPRSYTIPVASLGKGVACNPACFITQLLPVKRKLGFYEATSRLRSHINPTGTVLLQLENTMQTSLKDLL

SEQ ID NO: 621 - DNA, 1194 bp, Artificial Sequence
  variant of human alpha-galactosidase A
ctggataatggattggctagaacacctcctatggggtggcttcactgggagaggttcatgtgcaacctggactgtcaggaagaaccagacagctgcatctccgagaagctctttatggaaatggccgaactgatggtgtccgagggctggaaagatgcaggttacgagtatctgtgtattgacgattgctggatggccccacaacgggattctgagggaagacttcaggctgatccgcagcgcttccctcatggcataaggcagctggcaaactacgtccacagtaaggggctcaaattgggaatctacgcggacgtgggcaataagacctgtgccggttttccgggatcattcgggtattatgacattgacgcccaaacgtttgctgattggggcgttgacctgctgaaattcgatggttgctactgtgacagcctcgaaaacctggcagacggctacaagcatatgtctctcgccctgaatagaaccggtcggccaatcgtatattcctgcgagtggcctctttacatgtggccatttcagaaaccgaactacacagaaattcgccagtattgcaatcattggaggaacttcgctgatatcgatgactcatggaagtccataaagagcatcttggactggaccagtcggaatcaggagcgaattgtggatgtcgcaggccctggaggatggaacgatccagacatgctggtgatcggcaattttggcctctcttggaatcagcaggttacccaaatggctctgtgggcaattatggccgcccctcttttcatgagcaacgatctgcgcgctatctcaccacaggcaaaggccctgctccaagacaaagatgtgatagccatcaatcaggacccgttgggaaagcagggctaccagctgagaaaaggcgacaactttgaggtctgggaaaggcctttgagtggagatgcgtgggctgtggccataattaatcggcaagagatcggaggtccacgctcctatacaattcctgtagcatctcttggcaagggcgttgcctgtaacccagcttgcttcatcactcagcttctgccggtgaagagaaaactgggtttctacgaagctaccagcaggctccgatcccacatcaaccctacaggaaccgtcctcttgcagctggagaatacgatgcagacttcactgaaggacctcctg

SEQ ID NO: 622 - protein, 398 aa, Artificial Sequence
  variant of human alpha-galactosidase A
LDNGLARTPPMGWLHWERFMCNLDCQEEPDSCISEKLFMEMAELMVSEGWKDAGYEYLCIDDCWMAPQRDSEGRLQADPQRFPHGIRQLANYVHSKGLKLGIYADVGNKTCAGFPGSFGYYDIDAQTFADWGVDLLKFDGCYCDSLENLADGYKHMSLALNRTGRPIVYSCEWPLYMWPFQKPNYTEIRQYCNHWRNFADIDDSWKSIKSILDWTSRNQERIVDVAGPGGWNDPDMLVIGNFGLSWNQQVTQMALWAIMAAPLFMSNDLRAISPQAKALLQDKDVIAINQDPLGKQGYQLRKGDNFEVWERPLSGDAWAVAIINRQEIGGPRSYTIPVASLGKGVACNPACFITQLLPVKRKLGFYEATSRLRSHINPTGTVLLQLENTMQTSLKDLL

SEQ ID NO: 623 - DNA, 1194 bp, Artificial Sequence
  variant of human alpha-galactosidase A
ctggataatggattggctagaacacctcccatggggtggcttcactgggagaggttcatgtgcaacctggactgtcaggaagaaccagacagctgcatctccgagaagctctttatggaaatggccgaactgatggtgtccgagggctggaaagatgcaggttacgagtatctgtgtattgacgattgctggatggccccacaacgggattctgagggaagacttcaggctgatccgcagcgcttccctcatggcataaggcagctggcaaactacgtccacagtaaggggctcaaattgggaatctacgcggacgtgggcaataagacctgtgccggttttccgggatcattcgggtattatgacattgacgcccaaacgtttgctgattggggcgttgacctgctgaaattcgatggttgctactgtgacagcctcgaaaacctggcagacggctacaagcatatgtctctcgccctgaatagaaccggtcggccaatcgtatattcctgcgagtggcctctttacatgtggccatttcagaaaccgaactacacagaaattcgccagtattgcaatcattggaggaacttcgctgatatcgatgactcatggaagtccataaagagcatcttggactggaccagtcggaatcaggagcgaattgtggatgtcgcaggccctggaggatggaacgatccagacatgctggtgatcggcaattttggcctctcttgggatcagcaggttacccaaatggctctgtgggcaattatggccggccctcttttcatgagcaacgatctgcgcgcgatctcaccacaggcaaaggccctgctccaagacaaagatgtgatagccatcaatcaggacccgttgggaaagcagggctaccagctgagaaaaggcgacaactttgaggtctgggaaaggcctttgagtggagatgcgtgggctgtggccattattaatcggcaagagatcggaggtccacgctcctatacaattcctgtagcatctcttggcaagggcgttgcctgtaacccagcttgcttcatcactcagcttctgccggtgaagagaaaactgggtttctacgaagctaccagcaggctccgatcccacatcaaccctacaggaaccgtcctcttgcagctggagaatacgatgcagatgtcactgaaggacctcctg

SEQ ID NO: 624 - protein, 398 aa, Artificial Sequence
  variant of human alpha-galactosidase A
LDNGLARTPPMGWLHWERFMCNLDCQEEPDSCISEKLFMEMAELMVSEGWKDAGYEYLCIDDCWMAPQRDSEGRLQADPQRFPHGIRQLANYVHSKGLKLGIYADVGNKTCAGFPGSFGYYDIDAQTFADWGVDLLKFDGCYCDSLENLADGYKHMSLALNRTGRPIVYSCEWPLYMWPFQKPNYTEIRQYCNHWRNFADIDDSWKSIKSILDWTSRNQERIVDVAGPGGWNDPDMLVIGNFGLSWDQQVTQMALWAIMAGPLFMSNDLRAISPQAKALLQDKDVIAINQDPLGKQGYQLRKGDNFEVWERPLSGDAWAVAIINRQEIGGPRSYTIPVASLGKGVACNPACFITQLLPVKRKLGFYEATSRLRSHINPTGTVLLQLENTMQMSLKDLL

SEQ ID NO: 625 - DNA, 1194 bp, Artificial Sequence
  variant of human alpha-galactosidase A
ctggataatggattggctagaacacctaccatggggtggcttcactgggagaggttcatgtgcaacctggactgtcaggaagaaccagacagctgcatctccgagaagctctttatggaaatggccgaacggatggtgtccgagggctggaaagatgcaggttacgagtatctgtgtattgacgattgctggatggccccacaacgggattctgagggaagacttcaggctgatccgcagcgcttccctcatggcataaggcagctggcaaactacgtccacagtaaggggctcaaattgggaatctacgcggacgtgggcaataagacctgtgccggttttccgggatcattcgggtattatgacattgacgcccaaacgtttgctgattggggcgttgacctgctgaaattcgatggttgctactgtgacagcctcgaaaacctggcagacggctacaagcatatgtctctcgccctgaatagaaccggtcggccaatcgtatattcctgcgagtggcctctttacatgtggccatttcagaaaccgaactacacagaaattcgccagtattgcaatcattggaggaacttcgctgatatcgatgactcatgggcctccataaagagcatcttggactggaccagtcggaatcaggagcgaattgtggatgtcgcaggccctggaggatggaacgatccagacatgctggtgatcggcaattttggcctctcttgggaccagcaggttacccaaatggctctgtgggcaattatggccggtcctcttttcatgagcaacgatctgcgcgctatctcaccacaggcaaaggccctgctccaagacaaagatgtgatagccatcaatcaggacccgttgggaaagcagggctaccagctgagaaagggcgacaactttgaggtctgggaaaggcctttgagtggagatgcgtgggctgtggccattattaatcggcaagagatcggaggtccacgctcctatacaattgctgtagcatctcttggcaagggcgttgcctgtaacccagcttgcttcatcactcagcttctgccggtgaagagaaaactgggtttctacgaagcaaccagcaggctccgatcccacatcaaccctacaggaaccgtcctcttgcagctggagaatacgatgcagacttcactgaaggacctcctg

SEQ ID NO: 626 - protein, 398 aa, Artificial Sequence
  variant of human alpha-galactosidase A
LDNGLARTPTMGWLHWERFMCNLDCQEEPDSCISEKLFMEMAERMVSEGWKDAGYEYLCIDDCWMAPQRDSEGRLQADPQRFPHGIRQLANYVHSKGLKLGIYADVGNKTCAGFPGSFGYYDIDAQTFADWGVDLLKFDGCYCDSLENLADGYKHMSLALNRTGRPIVYSCEWPLYMWPFQKPNYTEIRQYCNHWRNFADIDDSWASIKSILDWTSRNQERIVDVAGPGGWNDPDMLVIGNFGLSWDQQVTQMALWAIMAGPLFMSNDLRAISPQAKALLQDKDVIAINQDPLGKQGYQLRKGDNFEVWERPLSGDAWAVAIINRQEIGGPRSYTIAVASLGKGVACNPACFITQLLPVKRKLGFYEATSRLRSHINPTGTVLLQLENTMQTSLKDLL

SEQ ID NO: 627 - DNA, 1194 bp, Artificial Sequence
  variant of human alpha-galactosidase A
ctggataatggattggctagaacacctaccatggggtggcttcactgggagaggttcatgtgcaacctggactgtcaggaagaaccagacagctgcatctccgagaagctctttgaggaaatggccgaacggatggtgactgagggctggaaagatgcaggttacgagtatctgtgtattgacgattgctggatggccccacaacgggattctgagggaagacttcaggctgatccgcagcgcttccctcatggcataaggcagctggcaaactacgtccacagtaaggggctcaaattgggaatctacgcggacgtgggcaataagacctgtgccggttttccgggatcattcgggtattatgacattgacgcccaaacgtttgctgattggggcgttgacctgctgaaattcgatggttgctactgtgacagcctcgaaaacctggcagacggctacaagcatatgtctctcgccctgaatagaaccggtcggtcaatcgtatattcctgcgagtggcctctttacatgtggccatttcagaaaccgaactacacagaaattcgccagtattgcaatcattggaggaacttcgctgatatcgatgactcatgggcctccataaagagcatcttggactggaccagttttaatcaggagcgaattgtggatgtcgcaggccctggaggatggaacgatccagacatgctggtgatcggcaattttggcctctcttggaatcagcaggttacccaaatggctctgtgggcaattatggccgcccctcttttcatgagcaacgatctgcgccatatctcaccacaggcaaaggccctgctccaagacaaagatgtgatagccatcaatcaggacccgttgggaaagcagggctaccagctgagaaagggcgacaactttgaggtctgggaaaggcctttgagtggagatgcgtgggctgtggccattattaatcggcaagagatcggaggtccacgctcctatacaattcctgtagcatctcttggcaagggcgttgcctgtaacccagcttgcttcatcactcagcttctgccggtgaagagaaaactgggtttctacgaagctaccagcaggctccgatcccacatcaaccctacaggaaccgtcctcttgcagctggagaatacgatgcagacttcactgaaggacctcctg

SEQ ID NO: 628 - protein, 398 aa, Artificial Sequence
  variant of human alpha-galactosidase A
LDNGLARTPTMGWLHWERFMCNLDCQEEPDSCISEKLFEEMAERMVTEGWKDAGYEYLCIDDCWMAPQRDSEGRLQADPQRFPHGIRQLANYVHSKGLKLGIYADVGNKTCAGFPGSFGYYDIDAQTFADWGVDLLKFDGCYCDSLENLADGYKHMSLALNRTGRSIVYSCEWPLYMWPFQKPNYTEIRQYCNHWRNFADIDDSWASIKSILDWTSFNQERIVDVAGPGGWNDPDMLVIGNFGLSWNQQVTQMALWAIMAAPLFMSNDLRHISPQAKALLQDKDVIAINQDPLGKQGYQLRKGDNFEVWERPLSGDAWAVAIINRQEIGGPRSYTIPVASLGKGVACNPACFITQLLPVKRKLGFYEATSRLRSHINPTGTVLLQLENTMQTSLKDLL

SEQ ID NO: 629 - DNA, 1194 bp, Artificial Sequence
  variant of human alpha-galactosidase A
ctggataatggattggctagaacacctaccatggggtggcttcactgggagaggttcatgtgcaacctggactgtcaggaagaaccagacagctgcatctccgagaagctctttgaggaaatggccgaacggatggtgtccgagggctggaaagatgcaggttacgagtatctgtgtattgacgattgctggatggccccacaacgggattctgagggaagacttcaggctgatccgcagcgcttccctcatggcataaggcagctggcaaaccacgtccacagtaaggggctcaaattgggaatctacgcggacgtgggcaataagacctgtgccggttttccgggatcattcgggtattatgacattgacgcccaaacgtttgctgattggggcgttgacctgctgaaattcgatggttgctactgtgacagcctcgaaaacctggcagacggctacaagcatatgtctctcgccctgaatagaaccggtcggtcaatcgtatattcctgcgagtggcctctttacatgtggccatttcagaaaccgaactacacagaaattcgccagtattgcaatcattggaggaacttcgctgatatcgatgactcatgggcctccataaagagcatcttggactggaccagtcggaatcaggagcgaattgtggatgtcgcaggccctggaggatggaacgatccagacatgctggtgatcggcaattttggcctctcttgggaccagcaggttacccaaatggctctgtgggcaattatggccggtcctcttttcatgagcaacgatctgcgcgcgatctcaccacaggcaaaggccctgctccaagacaaagatgtgatagccatcaatcaggacccgttgggaaagcagggctaccagctgagaaagggcgacaactttgaggtctgggaaaggcctttgagtggactcgcgtgggctgtggccataattaatcggcaagagatcggaggtccacgctcctatacaattcctgtagcatctcttggcaagggcgttgcctgtaacccagcttgcttcatcactcagcttctgccggtgaagagaaaactgggtttctacgaagcaaccagcaggctccgatcccacatcaaccctacaggaaccgtcctcttgcagctggagaatacgatgcagacttcactgaaggacctcctg

SEQ ID NO: 630 - protein, 398 aa, Artificial Sequence
  variant of human alpha-galactosidase A
LDNGLARTPTMGWLHWERFMCNLDCQEEPDSCISEKLFEEMAERMVSEGWKDAGYEYLCIDDCWMAPQRDSEGRLQADPQRFPHGIRQLANHVHSKGLKLGIYADVGNKTCAGFPGSFGYYDIDAQTFADWGVDLLKFDGCYCDSLENLADGYKHMSLALNRTGRSIVYSCEWPLYMWPFQKPNYTEIRQYCNHWRNFADIDDSWASIKSILDWTSRNQERIVDVAGPGGWNDPDMLVIGNFGLSWDQQVTQMALWAIMAGPLFMSNDLRAISPQAKALLQDKDVIAINQDPLGKQGYQLRKGDNFEVWERPLSGLAWAVAIINRQEIGGPRSYTIPVASLGKGVACNPACFITQLLPVKRKLGFYEATSRLRSHINPTGTVLLQLENTMQTSLKDLL

SEQ ID NO: 631 - DNA, 1194 bp, Artificial Sequence
  variant of human alpha-galactosidase A
ctggataatggattggctagaacacctaccatggggtggcttcactgggagaggttcatgtgcaacctggactgtcaggaagaaccagacagctgcatctccgagaagctctttgaggaaatggccgaacggatggtgtccgagggctggaaagatgcaggttacgagtatctgtgtattgacgattgctggatggccccacaacgggattctgagggaagacttcaggctgatccgcagcgcttccctcatggcataaggcagctggcaaactacgtccacagtaaggggctcaaattgggaatctacgcggacgtgggcaataagacctgtgccggttttccgggatcattcgggtattatgacattgacgcccaaacgtttgctgattggggcgttgacctgctgaaattcgatggttgctactgtgacagcctcgaaaacctggcagacggctacaagcatatgtctctcgccctgaatagaaccggtcggccaatcgtatattcctgcgagtggcctctttacatgtggccatttcagaaaccgaactacacagaaattcgccagtattgcaatcattggaggaacttcgctgatatcgatgactcatgggcctccataaagagcatcttggactggaccagtcggaatcaggagcgaattgtggatgtcgcaggccctggaggatggaacgatccagacatgctggtgatcggcaattttggcctctcttgggaccagcaggttacccaaatggctctgtgggcaattatggccggtcctcttttcatgagcaacgatctgcgcgcgatctcaccacaggcaaaggccctgctccaagacaaagatgtgatagccatcaatcaggacccgttgggaaagcagggctaccagctgagaaaaggcgacaactttgaggtctgggaaaggcctttgagtggactcgcgtgggctgtggccatgattaatcggcaagagatcggaggtccacgctcctatacaattcctgtagcatctcttggcaagggcgttgcctgtaacccagcttgcttcatcactcagcttctgccggtgaagagaaaactgggtttctacgaagcaaccagcaggctccgatcccacatcaaccctacaggaaccgtcctcttgcagctggagaatacgatgcagatgtcactgaaggacctcctg

SEQ ID NO: 632 - protein, 398 aa, Artificial Sequence
  variant of human alpha-galactosidase A
LDNGLARTPTMGWLHWERFMCNLDCQEEPDSCISEKLFEEMAERMVSEGWKDAGYEYLCIDDCWMAPQRDSEGRLQADPQRFPHGIRQLANYVHSKGLKLGIYADVGNKTCAGFPGSFGYYDIDAQTFADWGVDLLKFDGCYCDSLENLADGYKHMSLALNRTGRPIVYSCEWPLYMWPFQKPNYTEIRQYCNHWRNFADIDDSWASIKSILDWTSRNQERIVDVAGPGGWNDPDMLVIGNFGLSWDQQVTQMALWAIMAGPLFMSNDLRAISPQAKALLQDKDVIAINQDPLGKQGYQLRKGDNFEVWERPLSGLAWAVAMINRQEIGGPRSYTIPVASLGKGVACNPACFITQLLPVKRKLGFYEATSRLRSHINPTGTVLLQLENTMQMSLKDLL

SEQ ID NO: 633 - DNA, 1194 bp, Artificial Sequence
  variant of human alpha-galactosidase A
ctggataatggattggctagaacacctcctatggggtggcttcactgggagaggttcatgtgcaacctggactgtcaggaagaaccagacagctgcatctccgagaagctctttgaggaaatggccgaacgaatggtgactgagggctggaaagatgcaggttacgagtatctgtgtattgacgattgctggatggccccacaacgggattctgagggaagacttcaggctgatccgcagcgcttccctcatggcataaggcagctggcaaaccacgtccacagtaaggggctcaaattgggaatctacgcggacgtgggcaataagacctgtgccggttttccgggatcattcgggtattatgacattgacgcccaaacgtttgctgattggggcgttgacctgctgaaattcgatggttgctactgtgacagcctcgaaaacctggcagacggctacaagcatatgtctctcgccctgaatagaaccggtcggccaatcgtatattcctgcgagtggcctctttacatgtggccatttcagaaaccgaactacacagaaattcgccagtattgcaatcattggaggaacttcgctgatatcgatgactcatgggcctccataaagagcatcttggactggaccagttttaatcaggagcgaattgtggatgtcgcaggccctggaggatggaacgatccagacatgctggtgatcggcaattttggcctctcttgggaccagcaggttacccaaatggctctgtgggcaattatggccggtcctcttttcatgagcaacgatctgcgcgcgatctcaccacaggcaaaggccctgctccaagacaaagatgtgatagccatcaatcaggacccgttgggaaagcagggctaccagctgagaaagggcgacaactttgaggtctgggaaaggcctttgagtggagatgcgtgggctgtggccattattaatcggcaagagatcggaggtccacgctcctatacaattcctgtagcatctcttggcaagggcgttgcctgtaacccagcttgcttcatcactcagcttctgccggtgaagagaaaactgggtttctacgaagctaccagcaggctccgatcccacatcaaccctacaggaaccgtcctcttgcagctggagaatacgatgcagatgtcactgaaggacctcctg

SEQ ID NO: 634 - protein, 398 aa, Artificial Sequence
  variant of human alpha-galactosidase A
LDNGLARTPPMGWLHWERFMCNLDCQEEPDSCISEKLFEEMAERMVTEGWKDAGYEYLCIDDCWMAPQRDSEGRLQADPQRFPHGIRQLANHVHSKGLKLGIYADVGNKTCAGFPGSFGYYDIDAQTFADWGVDLLKFDGCYCDSLENLADGYKHMSLALNRTGRPIVYSCEWPLYMWPFQKPNYTEIRQYCNHWRNFADIDDSWASIKSILDWTSFNQERIVDVAGPGGWNDPDMLVIGNFGLSWDQQVTQMALWAIMAGPLFMSNDLRAISPQAKALLQDKDVIAINQDPLGKQGYQLRKGDNFEVWERPLSGDAWAVAIINRQEIGGPRSYTIPVASLGKGVACNPACFITQLLPVKRKLGFYEATSRLRSHINPTGTVLLQLENTMQMSLKDLL

SEQ ID NO: 635 - DNA, 1194 bp, Artificial Sequence
  variant of human alpha-galactosidase A
ctggataatggattggctagaacacctcctatggggtggcttcactgggagaggttcatgtgcaacctggactgtcaggaagaaccagacagctgcatctccgagaagctctttatggaaatggccgaacggatggtgactgagggctggaaagatgcaggttacgagtatctgtgtattgacgattgctggatggccccacaacgggattctgagggaagacttcaggctgatccgcagcgcttccctcatggcataaggcagctggcaaaccacgtccacagtaaggggctcaaattgggaatctacgcggacgtgggcaataagacctgtgccggttttccgggatcattcgggtattatgacattgacgcccaaacgtttgctgattggggcgttgacctgctgaaattcgatggttgctactgtgacagcctcgaaaacctggcagacggctacaagcatatgtctctcgccctgaatagaaccggtcggtcaatcgtatattcctgcgagtggcctctttacatgtggccatttcagaaaccgaactacacagaaattcgccagtattgcaatcattggaggaacttcgctgatatcgatgactcatgggcctccataaagagcatcttggactggaccagttttaatcaggagcgaattgtggatgtcgcaggccctggaggatggaacgatccagacatgctggtgatcggcaattttggcctctcttgggaccagcaggttacccaaatggctctgtgggcaattatggccgcccctcttttcatgagcaacgatctgcgcgcgatctcaccacaggcaaaggccctgctccaagacaaagatgtgatagccatcaatcaggacccgttgggaaagcagggctaccagctgagaaaaggcgacaactttgaggtctgggaaaggcctttgagtggactcgcgtgggctgtggccataattaatcggcaagagatcggaggtccacgctcctatacaattcctgtagcatctcttggcaagggcgttgcctgtaacccagcttgcttcatcactcagcttctgccggtgaagagaaaactgggtttctacgaatggaccagcaggctccgatcccacatcaaccctacaggaaccgtcctcttgcagctggagaatacgatgcagacttcactgaaggacctcctg

SEQ ID NO: 636 - protein, 398 aa, Artificial Sequence
  variant of human alpha-galactosidase A
LDNGLARTPPMGWLHWERFMCNLDCQEEPDSCISEKLFMEMAERMVTEGWKDAGYEYLCIDDCWMAPQRDSEGRLQADPQRFPHGIRQLANHVHSKGLKLGIYADVGNKTCAGFPGSFGYYDIDAQTFADWGVDLLKFDGCYCDSLENLADGYKHMSLALNRTGRSIVYSCEWPLYMWPFQKPNYTEIRQYCNHWRNFADIDDSWASIKSILDWTSFNQERIVDVAGPGGWNDPDMLVIGNFGLSWDQQVTQMALWAIMAAPLFMSNDLRAISPQAKALLQDKDVIAINQDPLGKQGYQLRKGDNFEVWERPLSGLAWAVAIINRQEIGGPRSYTIPVASLGKGVACNPACFITQLLPVKRKLGFYEWTSRLRSHINPTGTVLLQLENTMQTSLKDLL

SEQ ID NO: 637 - DNA, 1194 bp, Artificial Sequence
  variant of human alpha-galactosidase A
ctggataatggattggctagaacacctcccatggggtggcttcactgggagaggttcatgtgcaacctggactgtcaggaagaaccagacagctgcatctccgagaagctctttatggaaatggccgaacggatggtgtccgagggctggaaagatgcaggttacgagtatctgtgtattgacgattgctggatggccccacaacgggattctgagggaagacttcaggctgatccgcagcgcttccctcatggcataaggcagctggcaaaccacgtccacagtaaggggctcaaattgggaatctacgcggacgtgggcaataagacctgtgccggttttccgggatcattcgggtattatgacattgacgcccaaacgtttgctgattggggcgttgacctgctgaaattcgatggttgctactgtgacagcctcgaaaacctggcagacggctacaagcatatgtctctcgccctgaatagaaccggtcggtcaatcgtatattcctgcgagtggcctctttacatgtggccatttcagaaaccgaactacacagaaattcgccagtattgcaatcattggaggaacttcgctgatatcgatgactcatgggcctccataaagagcatcttggactggaccagttttaatcaggagcgaattgtggatgtcgcaggccctggaggatggaacgatccagacatgctggtgatcggcaattttggcctctcttgggaccagcaggttacccaaatggctctgtgggcaattatggccgcccctcttttcatgagcaacgatctgcgcgcgatctcaccacaggcaaaggccctgctccaagacaaagatgtgatagccatcaatcaggacccgttgggaaagcagggctaccagctgagaaaaggcgacaactttgaggtctgggaaaggcctttgagtggagatgcgtgggctgtggccataattaatcggcaagagatcggaggtccacgctcctatacaattcctgtagcatctcttggcaagggcgttgcctgtaacccagcttgcttcatcactcagcttctgccggtgaagagaaaactgggtttctacgaagctaccagcaggctccgatcccacatcaaccctacaggaaccgtcctcttgcagctggagaatacgatgcagatgtcactgaaggacctcctg

SEQ ID NO: 638 - protein, 398 aa, Artificial Sequence
  variant of human alpha-galactosidase A
LDNGLARTPPMGWLHWERFMCNLDCQEEPDSCISEKLFMEMAERMVSEGWKDAGYEYLCIDDCWMAPQRDSEGRLQADPQRFPHGIRQLANHVHSKGLKLGIYADVGNKTCAGFPGSFGYYDIDAQTFADWGVDLLKFDGCYCDSLENLADGYKHMSLALNRTGRSIVYSCEWPLYMWPFQKPNYTEIRQYCNHWRNFADIDDSWASIKSILDWTSFNQERIVDVAGPGGWNDPDMLVIGNFGLSWDQQVTQMALWAIMAAPLFMSNDLRAISPQAKALLQDKDVIAINQDPLGKQGYQLRKGDNFEVWERPLSGDAWAVAIINRQEIGGPRSYTIPVASLGKGVACNPACFITQLLPVKRKLGFYEATSRLRSHINPTGTVLLQLENTMQMSLKDLL

SEQ ID NO: 639 - DNA, 1194 bp, Artificial Sequence
  variant of human alpha-galactosidase A
ctggataatggattggctagaacacctaccatggggtggcttcactgggagaggttcatgtgcaacctggactgtcaggaagaaccagacagctgcatctccgagaagctctttatggaaatggccgaacggatggtgactgagggctggaaagatgcaggttacgagtatctgtgtattgacgattgctggatggccccacaacgggattctgagggaagacttcaggctgatccgcagcgcttccctcatggcataaggcagctggcaaactacgtccacagtaaggggctcaaattgggaatctacgcggacgtgggcaataagacctgtgccggttttccgggatcattcgggtattatgacattgacgcccaaacgtttgctgattggggcgttgacctgctgaaattcgatggttgctactgtgacagcctcgaaaacctggcagacggctacaagcatatgtctctcgccctgaatagaaccggtcggccaatcgtatattcctgcgagtggcctctttacatgtggccatttcagaaaccgaactacacagaaattcgccagtattgcaatcattggaggaacttcgctgatatcgatgactcatgggcctccataaagagcatcttggactggaccagttttaatcaggagcgaattgtggatgtcgcaggccctggaggatggaacgatccagacatgctggtgatcggcaattttggcctctcttgggaccagcaggttacccaaatggctctgtgggcaattatggccggccctcttttcatgagcaacgatctgcgcgctatctcaccacaggcaaaggccctgctccaagacaaagatgtgatagccatcaatcaggacccgttgggaaagcagggctaccagctgagaaagggcgacaactttgaggtctgggaaaggcctttgagtggactcgcgtgggctgtggccataattaatcggcaagagatcggaggtccacgctcctatacaattcctgtagcatctcttggcaagggcgttgcctgtaacccagcttgcttcatcactcagcttctgccggtgaagagaaaactgggtttctacgaagctaccagcaggctccgatcccacatcaaccctacaggaaccgtcctcttgcagctggagaatacgatgcagacttcactgaaggacctcctg

SEQ ID NO: 640 - protein, 398 aa, Artificial Sequence
  variant of human alpha-galactosidase A
LDNGLARTPTMGWLHWERFMCNLDCQEEPDSCISEKLFMEMAERMVTEGWKDAGYEYLCIDDCWMAPQRDSEGRLQADPQRFPHGIRQLANYVHSKGLKLGIYADVGNKTCAGFPGSFGYYDIDAQTFADWGVDLLKFDGCYCDSLENLADGYKHMSLALNRTGRPIVYSCEWPLYMWPFQKPNYTEIRQYCNHWRNFADIDDSWASIKSILDWTSFNQERIVDVAGPGGWNDPDMLVIGNFGLSWDQQVTQMALWAIMAGPLFMSNDLRAISPQAKALLQDKDVIAINQDPLGKQGYQLRKGDNFEVWERPLSGLAWAVAIINRQEIGGPRSYTIPVASLGKGVACNPACFITQLLPVKRKLGFYEATSRLRSHINPTGTVLLQLENTMQTSLKDLL

SEQ ID NO: 641 - DNA, 1194 bp, Artificial Sequence
  variant of human alpha-galactosidase A
ctggataatggattggctagaacacctcctatggggtggcttcactgggagaggttcatgtgcaacctggactgtcaggaagaaccagacagctgcatctccgagaagctctttgaggaaatggccgaacgaatggtgactgagggctggaaagatgcaggttacgagtatctgtgtattgacgattgctggatggccccacaacgggattctgagggaagacttcaggctgatccgcagcgcttccctcatggcataaggcagctggcaaaccacgtccacagtaaggggctcaaattgggaatctacgcggacgtgggcaataagacctgtgccggttttccgggatcattcgggtattatgacattgacgcccaaacgtttgctgattggggcgttgacctgctgaaattcgatggttgctactgtgacagcctcgaaaacctggcagacggctacaagcatatgtctctcgccctgaatagaaccggtcggccaatcgtatattcctgcgagtggcctctttacatgtggccatttcagaaaccgaactacacagaaattcgccagtattgcaatcattggaggaacttcgctgatatcgatgactcatgggcctccataaagagcatcttggactggaccagtcggaatcaggagcgaattgtggatgtcgcaggccctggaggatggaacgatccagacatgctggtgatcggcaattttggcctctcttgggaccagcaggttacccaaatggctctgtgggcaattatggccggtcctcttttcatgagcaacgatctgcgcgcgatctcaccacaggcaaaggccctgctccaagacaaagatgtgatagccatcaatcaggacccgttgggaaagcagggctaccagctgagaaaaggcgacaactttgaggtctgggaaaggcctttgagtggactcgcgtgggctgtggccatgattaatcggcaagagatcggaggtccacgctcctatacaattcctgtagcatctcttggcaagggcgttgcctgtaacccagcttgcttcatcactcagcttctgccggtgaagagaaaactgggtttctacgaatggaccagcaggctccgatcccacatcaaccctacaggaaccgtcctcttgcagctggagaatacgatgcagacttcactgaaggacctcctg

SEQ ID NO: 642 - protein, 398 aa, Artificial Sequence
  variant of human alpha-galactosidase A
LDNGLARTPPMGWLHWERFMCNLDCQEEPDSCISEKLFEEMAERMVTEGWKDAGYEYLCIDDCWMAPQRDSEGRLQADPQRFPHGIRQLANHVHSKGLKLGIYADVGNKTCAGFPGSFGYYDIDAQTFADWGVDLLKFDGCYCDSLENLADGYKHMSLALNRTGRPIVYSCEWPLYMWPFQKPNYTEIRQYCNHWRNFADIDDSWASIKSILDWTSRNQERIVDVAGPGGWNDPDMLVIGNFGLSWDQQVTQMALWAIMAGPLFMSNDLRAISPQAKALLQDKDVIAINQDPLGKQGYQLRKGDNFEVWERPLSGLAWAVAMINRQEIGGPRSYTIPVASLGKGVACNPACFITQLLPVKRKLGFYEWTSRLRSHINPTGTVLLQLENTMQTSLKDLL

SEQ ID NO: 643 - DNA, 1194 bp, Artificial Sequence
  variant of human alpha-galactosidase A
ctggataatggattggctagaacacctcctatggggtggcttcactgggagaggttcatgtgcaacctggactgtcaggaagaaccagacagctgcatctccgagaagctctttgaagaaatggccgaacggatggtgaccgagggctggaaagatgcaggttacgagtatctgtgtattgacgattgctggatggccccacaacgggattctgagggaagacttcaggctgatccgcagcgcttccctcatggcataaggcagctggcaaactacgtccacagtaaggggctcaaattgggaatctacgcggacgtgggcaataagacctgtgccggttttccgggatcattcgggtattatgacattgacgcccaaacgtttgctgattggggcgttgacctgctgaaattcgatggttgctactgtgacagcctcgaaaacctggcagacggctacaagcatatgtctctcgccctgaatagaaccggtcggtcaatcgtatattcctgcgagtggcctctttacatgtggccatttcagaaaccgaactacacagaaattcgccagtattgcaatcattggaggaacttcgctgatatcgatgactcatgggcctccataaagagcatcttggactggaccagtcggaatcaggagcgaattgtggatgtcgcaggccctggaggatggaacgatccagacatgctggtgatcggcaattttggcctctcttgggaccagcaggttacccaaatggctctgtgggcaattatggccggtcctcttttcatgagcaacgatctgcgcgcgatctcaccacaggcaaaggccctgctccaagacaaagatgtgatagccatcaatcaggacccgttgggaaagcagggctaccagctgagaaaaggcgacaactttgaggtctgggaaaggcctttgagtggactcgcgtgggctgtggccataattaatcggcaagagatcggaggtccacgctcctatacaattcctgtagcatctcttggcaagggcgttgcctgtaacccagcttgcttcatcactcagcttctgccggtgaagagaaaactgggtttctacgaagcaaccagcaggctccgatcccacatcaaccctacaggaaccgtcctcttgcagctggagaatacgatgcagacctcactgaaggacctcctg

SEQ ID NO: 644 - protein, 398 aa, Artificial Sequence
  variant of human alpha-galactosidase A
LDNGLARTPPMGWLHWERFMCNLDCQEEPDSCISEKLFEEMAERMVTEGWKDAGYEYLCIDDCWMAPQRDSEGRLQADPQRFPHGIRQLANYVHSKGLKLGIYADVGNKTCAGFPGSFGYYDIDAQTFADWGVDLLKFDGCYCDSLENLADGYKHMSLALNRTGRSIVYSCEWPLYMWPFQKPNYTEIRQYCNHWRNFADIDDSWASIKSILDWTSRNQERIVDVAGPGGWNDPDMLVIGNFGLSWDQQVTQMALWAIMAGPLFMSNDLRAISPQAKALLQDKDVIAINQDPLGKQGYQLRKGDNFEVWERPLSGLAWAVAIINRQEIGGPRSYTIPVASLGKGVACNPACFITQLLPVKRKLGFYEATSRLRSHINPTGTVLLQLENTMQTSLKDLL

SEQ ID NO: 645 - DNA, 1194 bp, Artificial Sequence
  variant of human alpha-galactosidase A
ctggataatggattggctagaacacctcctatggggtggcttcactgggagaggttcatgtgcaacctggactgtcaggaagaaccagacagctgcatctccgagaagctctttgaggaaatggccgaacgaatggtgactgagggctggaaagatgcaggttacgagtatctgtgtattgacgattgctggatggccccacaacgggattctgagggaagacttcaggctgatccgcagcgcttccctcatggcataaggcagctggcaaactacgtccacagtaaggggctcaaattgggaatctacgcggacgtgggcaataagacctgtgccggttttccgggatcattcgggtattatgacattgacgcccaaacgtttgctgattggggcgttgacctgctgaaattcgatggttgctactgtgacagcctcgaaaacctggcagacggctacaagcatatgtctctcgccctgaatagaaccggtcggtcaatcgtatattcctgcgagtggcctctttacatgtggccatttcagaaaccgaactacacagaaattcgccagtattgcaatcattggaggaacttcgctgatatcgatgactcatgggcctccataaagagcatcttggactggaccagttttaatcaggagcgaattgtggatgtcgcaggccctggaggatggaacgatccagacatgctggtgatcggcaattttggcctctcttgggatcagcaggttacccaaatggctctgtgggcaattatggccggtcctcttttcatgagcaacgatctgcgcgctatctcaccacaggcaaaggccctgctccaagacaaagatgtgatagccatcaatcaggacccgttgggaaagcagggctaccagctgagaaaaggcgacaactttgaggtctgggaaaggcctttgagtggactcgcgtgggctgtggccataattaatcggcaagagatcggaggtccacgctcctatacaattgctgtagcatctcttggcaagggcgttgcctgtaacccagcttgcttcatcactcagcttctgccggtgaagagaaaactgggtttctacgaagcaaccagcaggctccgatcccacatcaaccctacaggaaccgtcctcttgcagctggagaatacgatgcagatgtcactgaaggacctcctg

SEQ ID NO: 646 - protein, 398 aa, Artificial Sequence
  variant of human alpha-galactosidase A
LDNGLARTPPMGWLHWERFMCNLDCQEEPDSCISEKLFEEMAERMVTEGWKDAGYEYLCIDDCWMAPQRDSEGRLQADPQRFPHGIRQLANYVHSKGLKLGIYADVGNKTCAGFPGSFGYYDIDAQTFADWGVDLLKFDGCYCDSLENLADGYKHMSLALNRTGRSIVYSCEWPLYMWPFQKPNYTEIRQYCNHWRNFADIDDSWASIKSILDWTSFNQERIVDVAGPGGWNDPDMLVIGNFGLSWDQQVTQMALWAIMAGPLFMSNDLRAISPQAKALLQDKDVIAINQDPLGKQGYQLRKGDNFEVWERPLSGLAWAVAIINRQEIGGPRSYTIAVASLGKGVACNPACFITQLLPVKRKLGFYEATSRLRSHINPTGTVLLQLENTMQMSLKDLL

SEQ ID NO: 647 - DNA, 1194 bp, Artificial Sequence
  variant of human alpha-galactosidase A
ctggataatggattggctagaacacctcctatggggtggcttcactgggagaggttcatgtgcaacctggactgtcaggaagaaccagacagctgcatctccgagaagctctttgaggaaatggccgaacgaatggtgactgagggctggaaagatgcaggttacgagtatctgtgtattgacgattgctggatggccccacaacgggattctgagggaagacttcaggctgatccgcagcgcttccctcatggcataaggcagctggcaaactacgtccacagtaaggggctcaaattgggaatctacgcggacgtgggcaataagacctgtgccggttttccgggatcattcgggtattatgacattgacgcccaaacgtttgctgattggggcgttgacctgctgaaattcgatggttgctactgtgacagcctcgaaaacctggcagacggctacaagcatatgtctctcgccctgaatagaaccggtcggtcaatcgtatattcctgcgagtggcctctttacatgtggccatttcagaaaccgaactacacagaaattcgccagtattgcaatcattggaggaacttcgctgatatcgatgactcatgggcctccataaagagcatcttggactggaccagttttaatcaggagcgaattgtggatgtcgcaggccctggaggatggaacgatccagacatgctggtgatcggcaattttggcctctcttgggaccagcaggttacccaaatggctctgtgggcaattatggccgcccctcttttcatgagcaacgatctgcgccatatctcaccacaggcaaaggccctgctccaagacaaagatgtgatagccatcaatcaggacccgttgggaaagcagggctaccagctgagaaaaggcgacaactttgaggtctgggaaaggcctttgagtggagatgcgtgggctgtggccataattaatcggcaagagatcggaggtccacgctcctatacaattcctgtagcatctcttggcaagggcgttgcctgtaacccagcttgcttcatcactcagcttctgccggtgaagagaaaactgggtttctacgaagctaccagcaggctccgatcccacatcaaccctacaggaaccgtcctcttgcagctggagaatacgatgcagatgtcactgaaggacctcctg

SEQ ID NO: 648 - protein, 398 aa, Artificial Sequence
  variant of human alpha-galactosidase A
LDNGLARTPPMGWLHWERFMCNLDCQEEPDSCISEKLFEEMAERMVTEGWKDAGYEYLCIDDCWMAPQRDSEGRLQADPQRFPHGIRQLANYVHSKGLKLGIYADVGNKTCAGFPGSFGYYDIDAQTFADWGVDLLKFDGCYCDSLENLADGYKHMSLALNRTGRSIVYSCEWPLYMWPFQKPNYTEIRQYCNHWRNFADIDDSWASIKSILDWTSFNQERIVDVAGPGGWNDPDMLVIGNFGLSWDQQVTQMALWAIMAAPLFMSNDLRHISPQAKALLQDKDVIAINQDPLGKQGYQLRKGDNFEVWERPLSGDAWAVAIINRQEIGGPRSYTIPVASLGKGVACNPACFITQLLPVKRKLGFYEATSRLRSHINPTGTVLLQLENTMQMSLKDLL

SEQ ID NO: 649 - DNA, 1194 bp, Artificial Sequence
  variant of human alpha-galactosidase A
ctggataatggattggctagaacacctaccatggggtggcttcactgggagaggttcatgtgcaacctggactgtcaggaagaaccagacagctgcatctccgagaagctctttgaggaaatggccgaacgaatggtgactgagggctggaaagatgcaggttacgagtatctgtgtattgacgattgctggatggccccacaacgggattctgagggaagacttcaggctgatccgcagcgcttccctcatggcataaggcagctggcaaactacgtccacagtaaggggctcaaattgggaatctacgcggacgtgggcaataagacctgtgccggttttccgggatcattcgggtattatgacattgacgcccaaacgtttgctgattggggcgttgacctgctgaaattcgatggttgctactgtgacagcctcgaaaacctggcagacggctacaagcatatgtctctcgccctgaatagaaccggtcggccaatcgtatattcctgcgagtggcctctttacatgtggccatttcagaaaccgaactacacagaaattcgccagtattgcaatcattggaggaacttcgctgatatcgatgactcatgggcctccataaagagcatcttggactggaccagtcggaatcaggagcgaattgtggatgtcgcaggccctggaggatggaacgatccagacatgctggtgatcggcaattttggcctctcttgggaccagcaggttacccaaatggctctgtgggcaattatggccggccctcttttcatgagcaacgatctgcgcgcgatctcaccacaggcaaaggccctgctccaagacaaagatgtgatagccatcaatcaggacccgttgggaaagcagggctaccagctgagaaaaggcgacaactttgaggtctgggaaaggcctttgagtggactcgcgtgggctgtggccatgattaatcggcaagagatcggaggtccacgctcctatacaattcctgtagcatctcttggcaagggcgttgcctgtaacccagcttgcttcatcactcagcttctgccggtgaagagaaaactgggtttctacgaagctaccagcaggctccgatcccacatcaaccctacaggaaccgtcctcttgcagctggagaatacgatgcagacttcactgaaggacctcctg

SEQ ID NO: 650 - protein, 398 aa, Artificial Sequence
  variant of human alpha-galactosidase A
LDNGLARTPTMGWLHWERFMCNLDCQEEPDSCISEKLFEEMAERMVTEGWKDAGYEYLCIDDCWMAPQRDSEGRLQADPQRFPHGIRQLANYVHSKGLKLGIYADVGNKTCAGFPGSFGYYDIDAQTFADWGVDLLKFDGCYCDSLENLADGYKHMSLALNRTGRPIVYSCEWPLYMWPFQKPNYTEIRQYCNHWRNFADIDDSWASIKSILDWTSRNQERIVDVAGPGGWNDPDMLVIGNFGLSWDQQVTQMALWAIMAGPLFMSNDLRAISPQAKALLQDKDVIAINQDPLGKQGYQLRKGDNFEVWERPLSGLAWAVAMINRQEIGGPRSYTIPVASLGKGVACNPACFITQLLPVKRKLGFYEATSRLRSHINPTGTVLLQLENTMQTSLKDLL

SEQ ID NO: 651 - DNA, 1194 bp, Artificial Sequence
  variant of human alpha-galactosidase A
ctggataatggattggctagaacacctaccatggggtggcttcactgggagaggttcatgtgcaacctggactgtcaggaagaaccagacagctgcatctccgagaagctctttgaggaaatggccgaacgaatggtgactgagggctggaaagatgcaggttacgagtatctgtgtattgacgattgctggatggccccacaacgggattctgagggaagacttcaggctgatccgcagcgcttccctcatggcataaggcagctggcaaactacgtccacagtaaggggctcaaattgggaatctacgcggacgtgggcaataagacctgtgccggttttccgggatcattcgggtattatgacattgacgcccaaacgtttgctgattggggcgttgacctgctgaaattcgatggttgctactgtgacagcctcgaaaacctggcagacggctacaagcatatgtctctcgccctgaatagaaccggtcggtcaatcgtatattcctgcgagtggcctctttacatgtggccatttcagaaaccgaactacacagaaattcgccagtattgcaatcattggaggaacttcgctgatatcgatgactcatgggcctccataaagagcatcttggactggaccagtcggaatcaggagcgaattgtggatgtcgcaggccctggaggatggaacgatccagacatgctggtgatcggcaattttggcctctcttgggaccagcaggttacccaaatggctctgtgggcaattatggccggtcctcttttcatgagcaacgatctgcgcgcgatctcaccacaggcaaaggccctgctccaagacaaagatgtgatagccatcaatcaggacccgttgggaaagcagggctaccagctgagaaaaggcgacaactttgaggtctgggaaaggcctttgagtggagatgcgtgggctgtggccataattaatcggcaagagatcggaggtccacgctcctatacaattcctgtagcatctcttggcaagggcgttgcctgtaacccagcttgcttcatcactcagcttctgccggtgaagagaaaactgggtttctacgaagctaccagcaggctccgatcccacatcaaccctacaggaaccgtcctcttgcagctggagaatacgatgcagacttcactgaaggacctcctg

SEQ ID NO: 652 - protein, 398 aa, Artificial Sequence
  variant of human alpha-galactosidase A
LDNGLARTPTMGWLHWERFMCNLDCQEEPDSCISEKLFEEMAERMVTEGWKDAGYEYLCIDDCWMAPQRDSEGRLQADPQRFPHGIRQLANYVHSKGLKLGIYADVGNKTCAGFPGSFGYYDIDAQTFADWGVDLLKFDGCYCDSLENLADGYKHMSLALNRTGRSIVYSCEWPLYMWPFQKPNYTEIRQYCNHWRNFADIDDSWASIKSILDWTSRNQERIVDVAGPGGWNDPDMLVIGNFGLSWDQQVTQMALWAIMAGPLFMSNDLRAISPQAKALLQDKDVIAINQDPLGKQGYQLRKGDNFEVWERPLSGDAWAVAIINRQEIGGPRSYTIPVASLGKGVACNPACFITQLLPVKRKLGFYEATSRLRSHINPTGTVLLQLENTMQTSLKDLL

SEQ ID NO: 653 - DNA, 1194 bp, Artificial Sequence
  variant of human alpha-galactosidase A
ctggataatggattggctagaacacctaccatggggtggcttcactgggagaggttcatgtgcaacctggactgtcaggaagaaccagacagctgcatctccgagaagctctttgaggaaatggccgaacggatggtgaccgagggctggaaagatgcaggttacgagtatctgtgtattgacgattgctggatggccccacaacgggattctgagggaagacttcaggctgatccgcagcgcttccctcatggcataaggcagctggcaaactacgtccacagtaaggggctcaaattgggaatctacgcggacgtgggcaataagacctgtgccggttttccgggatcattcgggtattatgacattgacgcccaaacgtttgctgattggggcgttgacctgctgaaattcgatggttgctactgtgacagcctcgaaaacctggcagacggctacaagcatatgtctctcgccctgaatagaaccggtcggtcaatcgtatattcctgcgagtggcctctttacatgtggccatttcagaaaccgaactacacagaaattcgccagtattgcaatcattggaggaacttcgctgatatcgatgactcatgggcctccataaagagcatcttggactggaccagtcggaatcaggagcgaattgtggatgtcgcaggccctggaggatggaacgatccagacatgctggtgatcggcaattttggcctctcttgggatcagcaggttacccaaatggctctgtgggcaattatggccggccctcttttcatgagcaacgatctgcgcgcgatctcaccacaggcaaaggccctgctccaagacaaagatgtgatagccatcaatcaggacccgttgggaaagcagggctaccagctgagaaagggcgacaactttgaggtctgggaaaggcctttgagtggagatgcgtgggctgtggccattattaatcggcaagagatcggaggtccacgctcctatacaattgctgtagcatctcttggcaagggcgttgcctgtaacccagcttgcttcatcactcagcttctgccggtgaagagaaaactgggtttctacgaatggaccagcaggctccgatcccacatcaaccctacaggaaccgtcctcttgcagctggagaatacgatgcagacctcactgaaggacctcctg

SEQ ID NO: 654 - protein, 398 aa, Artificial Sequence
  variant of human alpha-galactosidase A
LDNGLARTPTMGWLHWERFMCNLDCQEEPDSCISEKLFEEMAERMVTEGWKDAGYEYLCIDDCWMAPQRDSEGRLQADPQRFPHGIRQLANYVHSKGLKLGIYADVGNKTCAGFPGSFGYYDIDAQTFADWGVDLLKFDGCYCDSLENLADGYKHMSLALNRTGRSIVYSCEWPLYMWPFQKPNYTEIRQYCNHWRNFADIDDSWASIKSILDWTSRNQERIVDVAGPGGWNDPDMLVIGNFGLSWDQQVTQMALWAIMAGPLFMSNDLRAISPQAKALLQDKDVIAINQDPLGKQGYQLRKGDNFEVWERPLSGDAWAVAIINRQEIGGPRSYTIAVASLGKGVACNPACFITQLLPVKRKLGFYEWTSRLRSHINPTGTVLLQLENTMQTSLKDLL

SEQ ID NO: 655 - DNA, 1194 bp, Artificial Sequence
  variant of human alpha-galactosidase A
ctggataatggattggctagaacacctaccatggggtggcttcactgggagaggttcatgtgcaacctggactgtcaggaagaaccagacagctgcatctccgagaagctctttgaggaaatggccgaacggatggtgactgagggctggaaagatgcaggttacgagtatctgtgtattgacgattgctggatggccccacaacgggattctgagggaagacttcaggctgatccgcagcgcttccctcatggcataaggcagctggcaaaccacgtccacagtaaggggctcaaattgggaatctacgcggacgtgggcaataagacctgtgccggttttccgggatcattcgggtattatgacattgacgcccaaacgtttgctgattggggcgttgacctgctgaaattcgatggttgctactgtgacagcctcgaaaacctggcagacggctacaagcatatgtctctcgccctgaatagaaccggtcggccaatcgtatattcctgcgagtggcctctttacatgtggccatttcagaaaccgaactacacagaaattcgccagtattgcaatcattggaggaacttcgctgatatcgatgactcatgggcctccataaagagcatcttggactggaccagttttaatcaggagcgaattgtggatgtcgcaggccctggaggatggaacgatccagacatgctggtgatcggcaattttggcctctcttgggatcagcaggttacccaaatggctctgtgggcaattatggccggccctcttttcatgagcaacgatctgcgcgcgatctcaccacaggcaaaggccctgctccaagacaaagatgtgatagccatcaatcaggacccgttgggaaagcagggctaccagctgagaaaaggcgacaactttgaggtctgggaaaggcctttgagtggagatgcgtgggctgtggccatgattaatcggcaagagatcggaggtccacgctcctatacaattcctgtagcatctcttggcaagggcgttgcctgtaacccagcttgcttcatcactcagcttctgccggtgaagagaaaactgggtttctacgaagctaccagcaggctccgatcccacatcaaccctacaggaaccgtcctcttgcagctggagaatacgatgcagacctcactgaaggacctcctg

SEQ ID NO: 656 - protein, 398 aa, Artificial Sequence
  variant of human alpha-galactosidase A
LDNGLARTPTMGWLHWERFMCNLDCQEEPDSCISEKLFEEMAERMVTEGWKDAGYEYLCIDDCWMAPQRDSEGRLQADPQRFPHGIRQLANHVHSKGLKLGIYADVGNKTCAGFPGSFGYYDIDAQTFADWGVDLLKFDGCYCDSLENLADGYKHMSLALNRTGRPIVYSCEWPLYMWPFQKPNYTEIRQYCNHWRNFADIDDSWASIKSILDWTSFNQERIVDVAGPGGWNDPDMLVIGNFGLSWDQQVTQMALWAIMAGPLFMSNDLRAISPQAKALLQDKDVIAINQDPLGKQGYQLRKGDNFEVWERPLSGDAWAVAMINRQEIGGPRSYTIPVASLGKGVACNPACFITQLLPVKRKLGFYEATSRLRSHINPTGTVLLQLENTMQTSLKDLL

SEQ ID NO: 657 - DNA, 1194 bp, Artificial Sequence
  variant of human alpha-galactosidase A
ctggataatggattggctagaacacctaccatggggtggcttcactgggagaggttcatgtgcaacctggactgtcaggaagaaccagacagctgcatctccgagaagctctttgaggaaatggccgaacggatggtgtccgagggctggaaagatgcaggttacgagtatctgtgtattgacgattgctggatggccccacaacgggattctgagggaagacttcaggctgatccgcagcgcttccctcatggcataaggcagctggcaaactacgtccacagtaaggggctcaaattgggaatctacgcggacgtgggcaataagacctgtgccggttttccgggatcattcgggtattatgacattgacgcccaaacgtttgctgattggggcgttgacctgctgaaattcgatggttgctactgtgacagcctcgaaaacctggcagacggctacaagcatatgtctctcgccctgaatagaaccggtcggtcaatcgtatattcctgcgagtggcctctttacatgtggccatttcagaaaccgaactacacagaaattcgccagtattgcaatcattggaggaacttcgctgatatcgatgactcatgggcctccataaagagcatcttggactggaccagtcggaatcaggagcgaattgtggatgtcgcaggccctggaggatggaacgatccagacatgctggtgatcggcaattttggcctctcttgggatcagcaggttacccaaatggctctgtgggcaattatggccggtcctcttttcatgagcaacgatctgcgccatatctcaccacaggcaaaggccctgctccaagacaaagatgtgatagccatcaatcaggacccgttgggaaagcagggctaccagctgagaaaaggcgacaactttgaggtctgggaaaggcctttgagtggactcgcgtgggctgtggccataattaatcggcaagagatcggaggtccacgctcctatacaattgctgtagcatctcttggcaagggcgttgcctgtaacccagcttgcttcatcactcagcttctgccggtgaagagaaaactgggtttctacgaagctaccagcaggctccgatcccacatcaaccctacaggaaccgtcctcttgcagctggagaatacgatgcagacttcactgaaggacctcctg

SEQ ID NO: 658 - protein, 398 aa, Artificial Sequence
  variant of human alpha-galactosidase A
LDNGLARTPTMGWLHWERFMCNLDCQEEPDSCISEKLFEEMAERMVSEGWKDAGYEYLCIDDCWMAPQRDSEGRLQADPQRFPHGIRQLANYVHSKGLKLGIYADVGNKTCAGFPGSFGYYDIDAQTFADWGVDLLKFDGCYCDSLENLADGYKHMSLALNRTGRSIVYSCEWPLYMWPFQKPNYTEIRQYCNHWRNFADIDDSWASIKSILDWTSRNQERIVDVAGPGGWNDPDMLVIGNFGLSWDQQVTQMALWAIMAGPLFMSNDLRHISPQAKALLQDKDVIAINQDPLGKQGYQLRKGDNFEVWERPLSGLAWAVAIINRQEIGGPRSYTIAVASLGKGVACNPACFITQLLPVKRKLGFYEATSRLRSHINPTGTVLLQLENTMQTSLKDLL

SEQ ID NO: 659 - DNA, 1194 bp, Artificial Sequence
  variant of human alpha-galactosidase A
ctggataatggattggctagaacacctaccatggggtggcttcactgggagaggttcatgtgcaacctggactgtcaggaagaaccagacagctgcatctccgagaagctctttgaggaaatggccgaacggatggtgtccgagggctggaaagatgcaggttacgagtatctgtgtattgacgattgctggatggccccacaacgggattctgagggaagacttcaggctgatccgcagcgcttccctcatggcataaggcagctggcaaaccacgtccacagtaaggggctcaaattgggaatctacgcggacgtgggcaataagacctgtgccggttttccgggatcattcgggtattatgacattgacgcccaaacgtttgctgattggggcgttgacctgctgaaattcgatggttgctactgtgacagcctcgaaaacctggcagacggctacaagcatatgtctctcgccctgaatagaaccggtcggtcaatcgtatattcctgcgagtggcctctttacatgtggccatttcagaaaccgaactacacagaaattcgccagtattgcaatcattggaggaacttcgctgatatcgatgactcatgggcctccataaagagcatcttggactggaccagtcggaatcaggagcgaattgtggatgtcgcaggccctggaggatggaacgatccagacatgctggtgatcggcaattttggcctctcttgggaccagcaggttacccaaatggctctgtgggcaattatggccggtcctcttttcatgagcaacgatctgcgccatatctcaccacaggcaaaggccctgctccaagacaaagatgtgatagccatcaatcaggacccgttgggaaagcagggctaccagctgagaaagggcgacaactttgaggtctgggaaaggcctttgagtggagatgcgtgggctgtggccattattaatcggcaagagatcggaggtccacgctcctatacaattcctgtagcatctcttggcaagggcgttgcctgtaacccagcttgcttcatcactcagcttctgccggtgaagagaaaactgggtttctacgaagcaaccagcaggctccgatcccacatcaaccctacaggaaccgtcctcttgcagctggagaatacgatgcagacttcactgaaggacctcctg

SEQ ID NO: 660 - protein, 398 aa, Artificial Sequence
  variant of human alpha-galactosidase A
LDNGLARTPTMGWLHWERFMCNLDCQEEPDSCISEKLFEEMAERMVSEGWKDAGYEYLCIDDCWMAPQRDSEGRLQADPQRFPHGIRQLANHVHSKGLKLGIYADVGNKTCAGFPGSFGYYDIDAQTFADWGVDLLKFDGCYCDSLENLADGYKHMSLALNRTGRSIVYSCEWPLYMWPFQKPNYTEIRQYCNHWRNFADIDDSWASIKSILDWTSRNQERIVDVAGPGGWNDPDMLVIGNFGLSWDQQVTQMALWAIMAGPLFMSNDLRHISPQAKALLQDKDVIAINQDPLGKQGYQLRKGDNFEVWERPLSGDAWAVAIINRQEIGGPRSYTIPVASLGKGVACNPACFITQLLPVKRKLGFYEATSRLRSHINPTGTVLLQLENTMQTSLKDLL

SEQ ID NO: 661 - DNA, 1194 bp, Artificial Sequence
  variant of human alpha-galactosidase A
ctggataatggattggctagaacacctcctatggggtggcttcactgggagaggttcatgtgcaacctggactgtcaggaagaaccagacagctgcatctccgagaagctctttgaggaaatggccgaacgaatggtgactgagggctggaaagatgcaggttacgagtatctgtgtattgacgattgctggatggccccacaacgggattctgagggaagacttcaggctgatccgcagcgcttccctcatggcataaggcagctggcaaaccacgtccacagtaaggggctcaaattgggaatctacgcggacgtgggcaataagacctgtgccggttttccgggatcattcgggtattatgacattgacgcccaaacgtttgctgattggggcgttgacctgctgaaattcgatggttgctactgtgacagcctcgaaaacctggcagacggctacaagcatatgtctctcgccctgaatagaaccggtcggtcaatcgtatattcctgcgagtggcctctttacatgtggccatttcagaaaccgaactacacagaaattcgccagtattgcaatcattggaggaacttcgctgatatcgatgactcatgggcctccataaagagcatcttggactggaccagtcggaatcaggagcgaattgtggatgtcgcaggccctggaggatggaacgatccagacatgctggtgatcggcaattttggcctctcttggaatcagcaggttacccaaatggctctgtgggcaattatggccggtcctcttttcatgagcaacgatctgcgccatatctcaccacaggcaaaggccctgctccaagacaaagatgtgatagccatcaatcaggacccgttgggaaagcagggctaccagctgagaaagggcgacaactttgaggtctgggaaaggcctttgagtggactcgcgtgggctgtggccattattaatcggcaagagatcggaggtccacgctcctatacaattcctgtagcatctcttggcaagggcgttgcctgtaacccagcttgcttcatcactcagcttctgccggtgaagagaaaactgggtttctacgaagcaaccagcaggctccgatcccacatcaaccctacaggaaccgtcctcttgcagctggagaatacgatgcagacctcactgaaggacctcctg

SEQ ID NO: 662 - protein, 398 aa, Artificial Sequence
  variant of human alpha-galactosidase A
LDNGLARTPPMGWLHWERFMCNLDCQEEPDSCISEKLFEEMAERMVTEGWKDAGYEYLCIDDCWMAPQRDSEGRLQADPQRFPHGIRQLANHVHSKGLKLGIYADVGNKTCAGFPGSFGYYDIDAQTFADWGVDLLKFDGCYCDSLENLADGYKHMSLALNRTGRSIVYSCEWPLYMWPFQKPNYTEIRQYCNHWRNFADIDDSWASIKSILDWTSRNQERIVDVAGPGGWNDPDMLVIGNFGLSWNQQVTQMALWAIMAGPLFMSNDLRHISPQAKALLQDKDVIAINQDPLGKQGYQLRKGDNFEVWERPLSGLAWAVAIINRQEIGGPRSYTIPVASLGKGVACNPACFITQLLPVKRKLGFYEATSRLRSHINPTGTVLLQLENTMQTSLKDLL

SEQ ID NO: 663 - DNA, 1194 bp, Artificial Sequence
  variant of human alpha-galactosidase A
ctggataatggattggctagaacacctcccatggggtggcttcactgggagaggttcatgtgcaacctggactgtcaggaagaaccagacagctgcatctccgagaagctctttgaggaaatggccgaacgaatggtgactgagggctggaaagatgcaggttacgagtatctgtgtattgacgattgctggatggccccacaacgggattctgagggaagacttcaggctgatccgcagcgcttccctcatggcataaggcagctggcaaaccacgtccacagtaaggggctcaaattgggaatctacgcggacgtgggcaataagacctgtgccggttttccgggatcattcgggtattatgacattgacgcccaaacgtttgctgattggggcgttgacctgctgaaattcgatggttgctactgtgacagcctcgaaaacctggcagacggctacaagcatatgtctctcgccctgaatagaaccggtcggtcaatcgtatattcctgcgagtggcctctttacatgtggccatttcagaaaccgaactacacagaaattcgccagtattgcaatcattggaggaacttcgctgatatcgatgactcatgggcctccataaagagcatcttggactggaccagtcggaatcaggagcgaattgtggatgtcgcaggccctggaggatggaacgatccagacatgctggtgatcggcaattttggcctctcttgggaccagcaggttacccaaatggctctgtgggcaattatggccggtcctcttttcatgagcaacgatctgcgcgcgatctcaccacaggcaaaggccctgctccaagacaaagatgtgatagccatcaatcaggacccgttgggaaaacagggctaccagctgagaaaaggcgacaactttgaggtctgggaaaggcctttgagtggactcgcgtgggctgtggccatgattaatcggcaagagatcggaggtccacgctcctatacaattgctgtagcatctcttggcaagggcgttgcctgtaacccagcttgcttcatcactcagcttctgccggtgaagagaaaactgggtttctacgaagctaccagcaggctccgatcccacatcaaccctacaggaaccgtcctcttgcagctggagaatacgatgcagacctcactgaaggacctcctg

SEQ ID NO: 664 - protein, 398 aa, Artificial Sequence
  variant of human alpha-galactosidase A
LDNGLARTPPMGWLHWERFMCNLDCQEEPDSCISEKLFEEMAERMVTEGWKDAGYEYLCIDDCWMAPQRDSEGRLQADPQRFPHGIRQLANHVHSKGLKLGIYADVGNKTCAGFPGSFGYYDIDAQTFADWGVDLLKFDGCYCDSLENLADGYKHMSLALNRTGRSIVYSCEWPLYMWPFQKPNYTEIRQYCNHWRNFADIDDSWASIKSILDWTSRNQERIVDVAGPGGWNDPDMLVIGNFGLSWDQQVTQMALWAIMAGPLFMSNDLRAISPQAKALLQDKDVIAINQDPLGKQGYQLRKGDNFEVWERPLSGLAWAVAMINRQEIGGPRSYTIAVASLGKGVACNPACFITQLLPVKRKLGFYEATSRLRSHINPTGTVLLQLENTMQTSLKDLL

SEQ ID NO: 665 - DNA, 1194 bp, Artificial Sequence
  variant of human alpha-galactosidase A
ctggataatggattggctagaacacctcccatggggtggcttcactgggagaggttcatgtgcaacctggactgtcaggaagaaccagacagctgcatctccgagaagctctttgaggaaatggccgaacggatggtgactgagggctggaaagatgcaggttacgagtatctgtgtattgacgattgctggatggccccacaacgggattctgagggaagacttcaggctgatccgcagcgcttccctcatggcataaggcagctggcaaaccacgtccacagtaaggggctcaaattgggaatctacgcggacgtgggcaataagacctgtgccggttttccgggatcattcgggtattatgacattgacgcccaaacgtttgctgattggggcgttgacctgctgaaattcgatggttgctactgtgacagcctcgaaaacctggcagacggctacaagcatatgtctctcgccctgaatagaaccggtcggtcaatcgtatattcctgcgagtggcctctttacatgtggccatttcagaaaccgaactacacagaaattcgccagtattgcaatcattggaggaacttcgctgatatcgatgactcatgggcctccataaagagcatcttggactggaccagttttaatcaggagcgaattgtggatgtcgcaggccctggaggatggaacgatccagacatgctggtgatcggcaattttggcctctcttgggatcagcaggttacccaaatggctctgtgggcaattatggccggccctcttttcatgagcaacgatctgcgcgctatctcaccacaggcaaaggccctgctccaagacaaagatgtgatagccatcaatcaggacccgttgggaaagcagggctaccagctgagaaaaggcgacaactttgaggtctgggaaaggcctttgagtggactcgcgtgggctgtggccatgattaatcggcaagagatcggaggtccacgctcctatacaattgctgtagcatctcttggcaagggcgttgcctgtaacccagcttgcttcatcactcagcttctgccggtgaagagaaaactgggtttctacgaagctaccagcaggctccgatcccacatcaaccctacaggaaccgtcctcttgcagctggagaatacgatgcagacttcactgaaggacctcctg

SEQ ID NO: 666 - protein, 398 aa, Artificial Sequence
  variant of human alpha-galactosidase A
LDNGLARTPPMGWLHWERFMCNLDCQEEPDSCISEKLFEEMAERMVTEGWKDAGYEYLCIDDCWMAPQRDSEGRLQADPQRFPHGIRQLANHVHSKGLKLGIYADVGNKTCAGFPGSFGYYDIDAQTFADWGVDLLKFDGCYCDSLENLADGYKHMSLALNRTGRSIVYSCEWPLYMWPFQKPNYTEIRQYCNHWRNFADIDDSWASIKSILDWTSFNQERIVDVAGPGGWNDPDMLVIGNFGLSWDQQVTQMALWAIMAGPLFMSNDLRAISPQAKALLQDKDVIAINQDPLGKQGYQLRKGDNFEVWERPLSGLAWAVAMINRQEIGGPRSYTIAVASLGKGVACNPACFITQLLPVKRKLGFYEATSRLRSHINPTGTVLLQLENTMQTSLKDLL

SEQ ID NO: 667 - DNA, 1194 bp, Artificial Sequence
  variant of human alpha-galactosidase A
ctggataatggattggctagaacacctcctatggggtggcttcactgggagaggttcatgtgcaacctggactgtcaggaagaaccagacagctgcatctccgagaagctctttgaagaaatggccgaactgatggtgtccgagggctggaaagatgcaggttacgagtatctgtgtattgacgattgctggatggccccacaacgggattctgagggaagacttcaggctgatccgcagcgcttccctcatggcataaggcagctggcaaaccacgtccacagtaaggggctcaaattgggaatctacgcggacgtgggcaataagacctgtgccggttttccgggatcattcgggtattatgacattgacgcccaaacgtttgctgattggggcgttgacctgctgaaattcgatggttgctactgtgacagcctcgaaaacctggcagacggctacaagcatatgtctctcgccctgaatagaaccggtcggccaatcgtatattcctgcgagtggcctctttacatgtggccatttcagaaaccgaactacacagaaattcgccagtattgcaatcattggaggaacttcgctgatatcgatgactcatgggcctccataaagagcatcttggactggaccagtcggaatcaggagcgaattgtggatgtcgcaggccctggaggatggaacgatccagacatgctggtgatcggcaattttggcctctcttggaatcagcaggttacccaaatggctctgtgggcaattatggccggccctcttttcatgagcaacgatctgcgccatatctcaccacaggcaaaggccctgctccaagacaaagatgtgatagccatcaatcaggacccgttgggaaagcagggctaccagctgagaaaaggcgacaactttgaggtctgggaaaggcctttgagtggagatgcgtgggctgtggccataattaatcggcaagagatcggaggtccacgctcctatacaattcctgtagcatctcttggcaagggcgttgcctgtaacccagcttgcttcatcactcagcttctgccggtgaagagaaaactgggtttctacgaagcaaccagcaggctccgatcccacatcaaccctacaggaaccgtcctcttgcagctggagaatacgatgcagatgtcactgaaggacctcctg

SEQ ID NO: 668 - protein, 398 aa, Artificial Sequence
  variant of human alpha-galactosidase A
LDNGLARTPPMGWLHWERFMCNLDCQEEPDSCISEKLFEEMAELMVSEGWKDAGYEYLCIDDCWMAPQRDSEGRLQADPQRFPHGIRQLANHVHSKGLKLGIYADVGNKTCAGFPGSFGYYDIDAQTFADWGVDLLKFDGCYCDSLENLADGYKHMSLALNRTGRPIVYSCEWPLYMWPFQKPNYTEIRQYCNHWRNFADIDDSWASIKSILDWTSRNQERIVDVAGPGGWNDPDMLVIGNFGLSWNQQVTQMALWAIMAGPLFMSNDLRHISPQAKALLQDKDVIAINQDPLGKQGYQLRKGDNFEVWERPLSGDAWAVAIINRQEIGGPRSYTIPVASLGKGVACNPACFITQLLPVKRKLGFYEATSRLRSHINPTGTVLLQLENTMQMSLKDLL

SEQ ID NO: 669 - DNA, 1194 bp, Artificial Sequence
  variant of human alpha-galactosidase A
ctggataatggattggctagaacacctcctatggggtggcttcactgggagaggttcatgtgcaacctggactgtcaggaagaaccagacagctgcatctccgagaagctctttgaggaaatggccgaacggatggtgtccgagggctggaaagatgcaggttacgagtatctgtgtattgacgattgctggatggccccacaacgggattctgagggaagacttcaggctgatccgcagcgcttccctcatggcataaggcagctggcaaaccacgtccacagtaaggggctcaaattgggaatctacgcggacgtgggcaataagacctgtgccggttttccgggatcattcgggtattatgacattgacgcccaaacgtttgctgattggggcgttgacctgctgaaattcgatggttgctactgtgacagcctcgaaaacctggcagacggctacaagcatatgtctctcgccctgaatagaaccggtcggccaatcgtatattcctgcgagtggcctctttacatgtggccatttcagaaaccgaactacacagaaattcgccagtattgcaatcattggaggaacttcgctgatatcgatgactcatggaagtccataaagagcatcttggactggaccagtcggaatcaggagcgaattgtggatgtcgcaggccctggaggatggaacgatccagacatgctggtgatcggcaattttggcctctcttgggatcagcaggttacccaaatggctctgtgggcaattatggccggtcctcttttcatgagcaacgatctgcgcgcgatctcaccacaggcaaaggccctgctccaagacaaagatgtgatagccatcaatcaggacccgttgggaaagcagggctaccagctgagaaaaggcgacaactttgaggtctgggaaaggcctttgagtggagatgcgtgggctgtggccattattaatcggcaagagatcggaggtccacgctcctatacaattcctgtagcatctcttggcaagggcgttgcctgtaacccagcttgcttcatcactcagcttctgccggtgaagagaaaactgggtttctacgaagctaccagcaggctccgatcccacatcaaccctacaggaaccgtcctcttgcagctggagaatacgatgcagacctcactgaaggacctcctg

SEQ ID NO: 670 - protein, 398 aa, Artificial Sequence
  variant of human alpha-galactosidase A
LDNGLARTPPMGWLHWERFMCNLDCQEEPDSCISEKLFEEMAERMVSEGWKDAGYEYLCIDDCWMAPQRDSEGRLQADPQRFPHGIRQLANHVHSKGLKLGIYADVGNKTCAGFPGSFGYYDIDAQTFADWGVDLLKFDGCYCDSLENLADGYKHMSLALNRTGRPIVYSCEWPLYMWPFQKPNYTEIRQYCNHWRNFADIDDSWKSIKSILDWTSRNQERIVDVAGPGGWNDPDMLVIGNFGLSWDQQVTQMALWAIMAGPLFMSNDLRAISPQAKALLQDKDVIAINQDPLGKQGYQLRKGDNFEVWERPLSGDAWAVAIINRQEIGGPRSYTIPVASLGKGVACNPACFITQLLPVKRKLGFYEATSRLRSHINPTGTVLLQLENTMQTSLKDLL

SEQ ID NO: 671 - DNA, 1194 bp, Artificial Sequence
  variant of human alpha-galactosidase A
ctggataatggattggctagaacacctcccatggggtggcttcactgggagaggttcatgtgcaacctggactgtcaggaagaaccagacagctgcatctccgagaagctctttgaagaaatggccgaacggatggtgtccgagggctggaaagatgcaggttacgagtatctgtgtattgacgattgctggatggccccacaacgggattctgagggaagacttcaggctgatccgcagcgcttccctcatggcataaggcagctggcaaaccacgtccacagtaaggggctcaaattgggaatctacgcggacgtgggcaataagacctgtgccggttttccgggatcattcgggtattatgacattgacgcccaaacgtttgctgattggggcgttgacctgctgaaattcgatggttgctactgtgacagcctcgaaaacctggcagacggctacaagcatatgtctctcgccctgaatagaaccggtcggtcaatcgtatattcctgcgagtggcctctttacatgtggccatttcagaaaccgaactacacagaaattcgccagtattgcaatcattggaggaacttcgctgatatcgatgactcatgggcctccataaagagcatcttggactggaccagttttaatcaggagcgaattgtggatgtcgcaggccctggaggatggaacgatccagacatgctggtgatcggcaattttggcctctcttgggatcagcaggttacccaaatggctctgtgggcaattatggccggccctcttttcatgagcaacgatctgcgccatatctcaccacaggcaaaggccctgctccaagacaaagatgtgatagccatcaatcaggacccgttgggaaagcagggctaccagctgagaaaaggcgacaactttgaggtctgggaaaggcctttgagtggagatgcgtgggctgtggccataattaatcggcaagagatcggaggtccacgctcctatacaattgctgtagcatctcttggcaagggcgttgcctgtaacccagcttgcttcatcactcagcttctgccggtgaagagaaaactgggtttctacgaagctaccagcaggctccgatcccacatcaaccctacaggaaccgtcctcttgcagctggagaatacgatgcagacctcactgaaggacctcctg

SEQ ID NO: 672 - protein, 398 aa, Artificial Sequence
  variant of human alpha-galactosidase A
LDNGLARTPPMGWLHWERFMCNLDCQEEPDSCISEKLFEEMAERMVSEGWKDAGYEYLCIDDCWMAPQRDSEGRLQADPQRFPHGIRQLANHVHSKGLKLGIYADVGNKTCAGFPGSFGYYDIDAQTFADWGVDLLKFDGCYCDSLENLADGYKHMSLALNRTGRSIVYSCEWPLYMWPFQKPNYTEIRQYCNHWRNFADIDDSWASIKSILDWTSFNQERIVDVAGPGGWNDPDMLVIGNFGLSWDQQVTQMALWAIMAGPLFMSNDLRHISPQAKALLQDKDVIAINQDPLGKQGYQLRKGDNFEVWERPLSGDAWAVAIINRQEIGGPRSYTIAVASLGKGVACNPACFITQLLPVKRKLGFYEATSRLRSHINPTGTVLLQLENTMQTSLKDLL

SEQ ID NO: 673 - DNA, 1194 bp, Artificial Sequence
  variant of human alpha-galactosidase A
ctggataatggattggctagaacacctcccatggggtggcttcactgggagaggttcatgtgcaacctggactgtcaggaagaaccagacagctgcatctccgagaagctctttgaagaaatggccgaactgatggtgtccgagggctggaaagatgcaggttacgagtatctgtgtattgacgattgctggatggccccacaacgggattctgagggaagacttcaggctgatccgcagcgcttccctcatggcataaggcagctggcaaactacgtccacagtaaggggctcaaattgggaatctacgcggacgtgggcaataagacctgtgccggttttccgggatcattcgggtattatgacattgacgcccaaacgtttgctgattggggcgttgacctgctgaaattcgatggttgctactgtgacagcctcgaaaacctggcagacggctacaagcatatgtctctcgccctgaatagaaccggtcggccaatcgtatattcctgcgagtggcctctttacatgtggccatttcagaaaccgaactacacagaaattcgccagtattgcaatcattggaggaacttcgctgatatcgatgactcatgggcctccataaagagcatcttggactggaccagttttaatcaggagcgaattgtggatgtcgcaggccctggaggatggaacgatccagacatgctggtgatcggcaattttggcctctcttgggaccagcaggttacccaaatggctctgtgggcaattatggccggtcctcttttcatgagcaacgatctgcgccatatctcaccacaggcaaaggccctgctccaagacaaagatgtgatagccatcaatcaggacccgttgggaaagcagggctaccagctgagaaagggcgacaactttgaggtctgggaaaggcctttgagtggagatgcgtgggctgtggccattattaatcggcaagagatcggaggtccacgctcctatacaattcctgtagcatctcttggcaagggcgttgcctgtaacccagcttgcttcatcactcagcttctgccggtgaagagaaaactgggtttctacgaagcaaccagcaggctccgatcccacatcaaccctacaggaaccgtcctcttgcagctggagaatacgatgcagacttcactgaaggacctcctg

SEQ ID NO: 674 - protein, 398 aa, Artificial Sequence
  variant of human alpha-galactosidase A
LDNGLARTPPMGWLHWERFMCNLDCQEEPDSCISEKLFEEMAELMVSEGWKDAGYEYLCIDDCWMAPQRDSEGRLQADPQRFPHGIRQLANYVHSKGLKLGIYADVGNKTCAGFPGSFGYYDIDAQTFADWGVDLLKFDGCYCDSLENLADGYKHMSLALNRTGRPIVYSCEWPLYMWPFQKPNYTEIRQYCNHWRNFADIDDSWASIKSILDWTSFNQERIVDVAGPGGWNDPDMLVIGNFGLSWDQQVTQMALWAIMAGPLFMSNDLRHISPQAKALLQDKDVIAINQDPLGKQGYQLRKGDNFEVWERPLSGDAWAVAIINRQEIGGPRSYTIPVASLGKGVACNPACFITQLLPVKRKLGFYEATSRLRSHINPTGTVLLQLENTMQTSLKDLL

SEQ ID NO: 675 - DNA, 1194 bp, Artificial Sequence
  variant of human alpha-galactosidase A
ctggataatggattggctagaacacctcccatggggtggcttcactgggagaggttcatgtgcaacctggactgtcaggaagaaccagacagctgcatctccgagaagctctttgaggaaatggccgaacgaatggtgactgagggctggaaagatgcaggttacgagtatctgtgtattgacgattgctggatggccccacaacgggattctgagggaagacttcaggctgatccgcagcgcttccctcatggcataaggcagctggcaaactacgtccacagtaaggggctcaaattgggaatctacgcggacgtgggcaataagacctgtgccggttttccgggatcattcgggtattatgacattgacgcccaaacgtttgctgattggggcgttgacctgctgaaattcgatggttgctactgtgacagcctcgaaaacctggcagacggctacaagcatatgtctctcgccctgaatagaaccggtcggccaatcgtatattcctgcgagtggcctctttacatgtggccatttcagaaaccgaactacacagaaattcgccagtattgcaatcattggaggaacttcgctgatatcgatgactcatgggcctccataaagagcatcttggactggaccagtcggaatcaggagcgaattgtggatgtcgcaggccctggaggatggaacgatccagacatgctggtgatcggcaattttggcctctcttgggaccagcaggttacccaaatggctctgtgggcaattatggccgcccctcttttcatgagcaacgatctgcgccatatctcaccacaggcaaaggccctgctccaagacaaagatgtgatagccatcaatcaggacccgttgggaaagcagggctaccagctgagaaagggcgacaactttgaggtctgggaaaggcctttgagtggagatgcgtgggctgtggccattattaatcggcaagagatcggaggtccacgctcctatacaattcctgtagcatctcttggcaagggcgttgcctgtaacccagcttgcttcatcactcagcttctgccggtgaagagaaaactgggtttctacgaagcaaccagcaggctccgatcccacatcaaccctacaggaaccgtcctcttgcagctggagaatacgatgcagacttcactgaaggacctcctg

SEQ ID NO: 676 - protein, 398 aa, Artificial Sequence
  variant of human alpha-galactosidase A
LDNGLARTPPMGWLHWERFMCNLDCQEEPDSCISEKLFEEMAERMVTEGWKDAGYEYLCIDDCWMAPQRDSEGRLQADPQRFPHGIRQLANYVHSKGLKLGIYADVGNKTCAGFPGSFGYYDIDAQTFADWGVDLLKFDGCYCDSLENLADGYKHMSLALNRTGRPIVYSCEWPLYMWPFQKPNYTEIRQYCNHWRNFADIDDSWASIKSILDWTSRNQERIVDVAGPGGWNDPDMLVIGNFGLSWDQQVTQMALWAIMAAPLFMSNDLRHISPQAKALLQDKDVIAINQDPLGKQGYQLRKGDNFEVWERPLSGDAWAVAIINRQEIGGPRSYTIPVASLGKGVACNPACFITQLLPVKRKLGFYEATSRLRSHINPTGTVLLQLENTMQTSLKDLL

SEQ ID NO: 677 - DNA, 1194 bp, Artificial Sequence
  variant of human alpha-galactosidase A
ctggataatggattggctagaacacctaccatggggtggcttcactgggagaggttcatgtgcaacctggactgtcaggaagaaccagacagctgcatctccgagaagctctttatggaaatggccgaactgatggtgaccgagggctggaaagatgcaggttacgagtatctgtgtattgacgattgctggatggccccacaacgggattctgagggaagacttcaggctgatccgcagcgcttccctcatggcataaggcagctggcaaaccacgtccacagtaaggggctcaaattgggaatctacgcggacgtgggcaataagacctgtgccggttttccgggatcattcgggtattatgacattgacgcccaaacgtttgctgattggggcgttgacctgctgaaattcgatggttgctactgtgacagcctcgaaaacctggcagacggctacaagcatatgtctctcgccctgaatagaaccggtcggtcaatcgtatattcctgcgagtggcctctttacatgtggccatttcagaaaccgaactacacagaaattcgccagtattgcaatcattggaggaacttcgctgatatcgatgactcatgggcctccataaagagcatcttggactggaccagtcggaatcaggagcgaattgtggatgtcgcaggccctggaggatggaacgatccagacatgctggtgatcggcaattttggcctctcttgggaccagcaggttacccaaatggctctgtgggcaattatggccgcccctcttttcatgagcaacgatctgcgccatatctcaccacaggcaaaggccctgctccaagacaaagatgtgatagccatcaatcaggacccgttgggaaagcagggctaccagctgagaaaaggcgacaactttgaggtctgggaaaggcctttgagtggactcgcgtgggctgtggccatgattaatcggcaagagatcggaggtccacgctcctatacaattcctgtagcatctcttggcaagggcgttgcctgtaacccagcttgcttcatcactcagcttctgccggtgaagagaaaactgggtttctacgaagctaccagcaggctccgatcccacatcaaccctacaggaaccgtcctcttgcagctggagaatacgatgcagacttcactgaaggacctcctg

SEQ ID NO: 678 - protein, 398 aa, Artificial Sequence
  variant of human alpha-galactosidase A
LDNGLARTPTMGWLHWERFMCNLDCQEEPDSCISEKLFMEMAELMVTEGWKDAGYEYLCIDDCWMAPQRDSEGRLQADPQRFPHGIRQLANHVHSKGLKLGIYADVGNKTCAGFPGSFGYYDIDAQTFADWGVDLLKFDGCYCDSLENLADGYKHMSLALNRTGRSIVYSCEWPLYMWPFQKPNYTEIRQYCNHWRNFADIDDSWASIKSILDWTSRNQERIVDVAGPGGWNDPDMLVIGNFGLSWDQQVTQMALWAIMAAPLFMSNDLRHISPQAKALLQDKDVIAINQDPLGKQGYQLRKGDNFEVWERPLSGLAWAVAMINRQEIGGPRSYTIPVASLGKGVACNPACFITQLLPVKRKLGFYEATSRLRSHINPTGTVLLQLENTMQTSLKDLL

SEQ ID NO: 679 - DNA, 1194 bp, Artificial Sequence
  variant of human alpha-galactosidase A
ctggataatggattggctagaacacctaccatggggtggcttcactgggagaggttcatgtgcaacctggactgtcaggaagaaccagacagctgcatctccgagaagctctttgaggaaatggccgaacggatggtgaccgagggctggaaagatgcaggttacgagtatctgtgtattgacgattgctggatggccccacaacgggattctgagggaagacttcaggctgatccgcagcgcttccctcatggcataaggcagctggcaaactacgtccacagtaaggggctcaaattgggaatctacgcggacgtgggcaataagacctgtgccggttttccgggatcattcgggtattatgacattgacgcccaaacgtttgctgattggggcgttgacctgctgaaattcgatggttgctactgtgacagcctcgaaaacctggcagacggctacaagcatatgtctctcgccctgaatagaaccggtcggtcaatcgtatattcctgcgagtggcctctttacatgtggccatttcagaaaccgaactacacagaaattcgccagtattgcaatcattggaggaacttcgctgatatcgatgactcatgggcctccataaagagcatcttggactggaccagtcggaatcaggagcgaattgtggatgtcgcaggccctggaggatggaacgatccagacatgctggtgatcggcaattttggcctctcttgggatcagcaggttacccaaatggctctgtgggcaattatggccgcccctcttttcatgagcaacgatctgcgccatatctcaccacaggcaaaggccctgctccaagacaaagatgtgatagccatcaatcaggacccgttgggaaagcagggctaccagctgagaaaaggcgacaactttgaggtctgggaaaggcctttgagtggagatgcgtgggctgtggccattattaatcggcaagagatcggaggtccacgctcctatacaattcctgtagcatctcttggcaagggcgttgcctgtaacccagcttgcttcatcactcagcttctgccggtgaagagaaaactgggtttctacgaagctaccagcaggctccgatcccacatcaaccctacaggaaccgtcctcttgcagctggagaatacgatgcagatgtcactgaaggacctcctg

SEQ ID NO: 680 - protein, 398 aa, Artificial Sequence
  variant of human alpha-galactosidase A
LDNGLARTPTMGWLHWERFMCNLDCQEEPDSCISEKLFEEMAERMVTEGWKDAGYEYLCIDDCWMAPQRDSEGRLQADPQRFPHGIRQLANYVHSKGLKLGIYADVGNKTCAGFPGSFGYYDIDAQTFADWGVDLLKFDGCYCDSLENLADGYKHMSLALNRTGRSIVYSCEWPLYMWPFQKPNYTEIRQYCNHWRNFADIDDSWASIKSILDWTSRNQERIVDVAGPGGWNDPDMLVIGNFGLSWDQQVTQMALWAIMAAPLFMSNDLRHISPQAKALLQDKDVIAINQDPLGKQGYQLRKGDNFEVWERPLSGDAWAVAIINRQEIGGPRSYTIPVASLGKGVACNPACFITQLLPVKRKLGFYEATSRLRSHINPTGTVLLQLENTMQMSLKDLL

SEQ ID NO: 681 - DNA, 1194 bp, Artificial Sequence
  variant of human alpha-galactosidase A
ctggataatggattggctagaacacctcctatggggtggcttcactgggagaggttcatgtgcaacctggactgtcaggaagaaccagacagctgcatctccgagaagctctttgaggaaatggccgaacggatggtgtccgagggctggaaagatgcaggttacgagtatctgtgtattgacgattgctggatggccccacaacgggattctgagggaagacttcaggctgatccgcagcgcttccctcatggcataaggcagctggcaaaccacgtccacagtaaggggctcaaattgggaatctacgcggacgtgggcaataagacctgtgccggttttccgggatcattcgggtattatgacattgacgcccaaacgtttgctgattggggcgttgacctgctgaaattcgatggttgctactgtgacagcctcgaaaacctggcagacggctacaagcatatgtctctcgccctgaatagaaccggtcggccaatcgtatattcctgcgagtggcctctttacatgtggccatttcagaaaccgaactacacagaaattcgccagtattgcaatcattggaggaacttcgctgatatcgatgactcatgggcctccataaagagcatcttggactggaccagttttaatcaggagcgaattgtggatgtcgcaggccctggaggatggaacgatccagacatgctggtgatcggcaattttggcctctcttggaatcagcaggttacccaaatggctctgtgggcaattatggccgcccctcttttcatgagcaacgatctgcgcgctatctcaccacaggcaaaggccctgctccaagacaaagatgtgatagccatcaatcaggacccgttgggaaagcagggctaccagctgagaaaaggcgacaactttgaggtctgggaaaggcctttgagtggagatgcgtgggctgtggccataattaatcggcaagagatcggaggtccacgctcctatacaattcctgtagcatctcttggcaagggcgttgcctgtaacccagcttgcttcatcactcagcttctgccggtgaagagaaaactgggtttctacgaagctaccagcaggctccgatcccacatcaaccctacaggaaccgtcctcttgcagctggagaatacgatgcagacttcactgaaggacctcctg

SEQ ID NO: 682 - protein, 398 aa, Artificial Sequence
  variant of human alpha-galactosidase A
LDNGLARTPPMGWLHWERFMCNLDCQEEPDSCISEKLFEEMAERMVSEGWKDAGYEYLCIDDCWMAPQRDSEGRLQADPQRFPHGIRQLANHVHSKGLKLGIYADVGNKTCAGFPGSFGYYDIDAQTFADWGVDLLKFDGCYCDSLENLADGYKHMSLALNRTGRPIVYSCEWPLYMWPFQKPNYTEIRQYCNHWRNFADIDDSWASIKSILDWTSFNQERIVDVAGPGGWNDPDMLVIGNFGLSWNQQVTQMALWAIMAAPLFMSNDLRAISPQAKALLQDKDVIAINQDPLGKQGYQLRKGDNFEVWERPLSGDAWAVAIINRQEIGGPRSYTIPVASLGKGVACNPACFITQLLPVKRKLGFYEATSRLRSHINPTGTVLLQLENTMQTSLKDLL

SEQ ID NO: 683 - DNA, 1194 bp, Artificial Sequence
  variant of human alpha-galactosidase A
ctggataatggattggctagaacacctcccatggggtggcttcactgggagaggttcatgtgcaacctggactgtcaggaagaaccagacagctgcatctccgagaagctctttatggaaatggccgaacggatggtgaccgagggctggaaagatgcaggttacgagtatctgtgtattgacgattgctggatggccccacaacgggattctgagggaagacttcaggctgatccgcagcgcttccctcatggcataaggcagctggcaaactacgtccacagtaaggggctcaaattgggaatctacgcggacgtgggcaataagacctgtgccggttttccgggatcattcgggtattatgacattgacgcccaaacgtttgctgattggggcgttgacctgctgaaattcgatggttgctactgtgacagcctcgaaaacctggcagacggctacaagcatatgtctctcgccctgaatagaaccggtcggccaatcgtatattcctgcgagtggcctctttacatgtggccatttcagaaaccgaactacacagaaattcgccagtattgcaatcattggaggaacttcgctgatatcgatgactcatgggcctccataaagagcatcttggactggaccagtcggaatcaggagcgaattgtggatgtcgcaggccctggaggatggaacgatccagacatgctggtgatcggcaattttggcctctcttgggaccagcaggttacccaaatggctctgtgggcaattatggccgcccctcttttcatgagcaacgatctgcgcgcgatctcaccacaggcaaaggccctgctccaagacaaagatgtgatagccatcaatcaggacccgttgggaaagcagggctaccagctgagacagggcgacaactttgaggtctgggaaaggcctttgagtggagatgcgtgggctgtggccataattaatcggcaagagatcggaggtccacgctcctatacaattcctgtagcatctcttggcaagggcgttgcctgtaacccagcttgcttcatcactcagcttctgccggtgaagagaaaactgggtttctacgaagctaccagcaggctccgatcccacatcaaccctacaggaaccgtcctcttgcagctggagaatacgatgcagacttcactgaaggacctcctg

SEQ ID NO: 684 - protein, 398 aa, Artificial Sequence
  variant of human alpha-galactosidase A
LDNGLARTPPMGWLHWERFMCNLDCQEEPDSCISEKLFMEMAERMVTEGWKDAGYEYLCIDDCWMAPQRDSEGRLQADPQRFPHGIRQLANYVHSKGLKLGIYADVGNKTCAGFPGSFGYYDIDAQTFADWGVDLLKFDGCYCDSLENLADGYKHMSLALNRTGRPIVYSCEWPLYMWPFQKPNYTEIRQYCNHWRNFADIDDSWASIKSILDWTSRNQERIVDVAGPGGWNDPDMLVIGNFGLSWDQQVTQMALWAIMAAPLFMSNDLRAISPQAKALLQDKDVIAINQDPLGKQGYQLRQGDNFEVWERPLSGDAWAVAIINRQEIGGPRSYTIPVASLGKGVACNPACFITQLLPVKRKLGFYEATSRLRSHINPTGTVLLQLENTMQTSLKDLL

SEQ ID NO: 685 - DNA, 1194 bp, Artificial Sequence
  variant of human alpha-galactosidase A
ctggataatggattggctagaacacctcccatggggtggcttcactgggagaggttcatgtgcaacctggactgtcaggaagaaccagacagctgcatctccgagaagctctttatggaaatggccgaacggatggtgaccgagggctggaaagatgcaggttacgagtatctgtgtattgacgattgctggatggccccacaacgggattctgagggaagacttcaggctgatccgcagcgcttccctcatggcataaggcagctggcaaactacgtccacagtaaggggctcaaattgggaatctacgcggacgtgggcaataagacctgtgccggttttccgggatcattcgggtattatgacattgacgcccaaacgtttgctgattggggcgttgacctgctgaaattcgatggttgctactgtgacagcctcgaaaacctggcagacggctacaagcatatgtctctcgccctgaatagaaccggtcggtcaatcgtatattcctgcgagtggcctctttacatgtggccatttcagaaaccgaactacacagaaattcgccagtattgcaatcattggaggaacttcgctgatatcgatgactcatgggcctccataaagagcatcttggactggaccagttttaatcaggagcgaattgtggatgtcgcaggccctggaggatggaacgatccagacatgctggtgatcggcaattttggcctctcttgggaccagcaggttacccaaatggctctgtgggcaattatggccggccctcttttcatgagcaacgatctgcgcgcgatctcaccacaggcaaaggccctgctccaagacaaagatgtgatagccatcaatcaggacccgttgggaaagcagggctaccagctgagaaaaggcgacaactttgaggtctgggaaaggcctttgagtggagatgcgtgggctgtggccattattaatcggcaagagatcggaggtccacgctcctatacaattcctgtagcatctcttggcaagggcgttgcctgtaacccagcttgcttcatcactcagcttctgccggtgaagagaaaactgggtttctacgaagctaccagcaggctccgatcccacatcaaccctacaggaaccgtcctcttgcagctggagaatacgatgcagatgtcactgaaggacctcctg

SEQ ID NO: 686 - protein, 398 aa, Artificial Sequence
  variant of human alpha-galactosidase A
LDNGLARTPPMGWLHWERFMCNLDCQEEPDSCISEKLFMEMAERMVTEGWKDAGYEYLCIDDCWMAPQRDSEGRLQADPQRFPHGIRQLANYVHSKGLKLGIYADVGNKTCAGFPGSFGYYDIDAQTFADWGVDLLKFDGCYCDSLENLADGYKHMSLALNRTGRSIVYSCEWPLYMWPFQKPNYTEIRQYCNHWRNFADIDDSWASIKSILDWTSFNQERIVDVAGPGGWNDPDMLVIGNFGLSWDQQVTQMALWAIMAGPLFMSNDLRAISPQAKALLQDKDVIAINQDPLGKQGYQLRKGDNFEVWERPLSGDAWAVAIINRQEIGGPRSYTIPVASLGKGVACNPACFITQLLPVKRKLGFYEATSRLRSHINPTGTVLLQLENTMQMSLKDLL

SEQ ID NO: 687 - DNA, 1194 bp, Artificial Sequence
  variant of human alpha-galactosidase A
ctggataatggattggctagaacacctcccatggggtggcttcactgggagaggttcatgtgcaacctggactgtcaggaagaaccagacagctgcatctccgagaagctctttatggaaatggccgaacggatggtgactgagggctggaaagatgcaggttacgagtatctgtgtattgacgattgctggatggccccacaacgggattctgagggaagacttcaggctgatccgcagcgcttccctcatggcataaggcagctggcaaaccacgtccacagtaaggggctcaaattgggaatctacgcggacgtgggcaataagacctgtgccggttttccgggatcattcgggtattatgacattgacgcccaaacgtttgctgattggggcgttgacctgctgaaattcgatggttgctactgtgacagcctcgaaaacctggcagacggctacaagcatatgtctctcgccctgaatagaaccggtcggccaatcgtatattcctgcgagtggcctctttacatgtggccatttcagaaaccgaactacacagaaattcgccagtattgcaatcattggaggaacttcgctgatatcgatgactcatgggcctccataaagagcatcttggactggaccagtcggaatcaggagcgaattgtggatgtcgcaggccctggaggatggaacgatccagacatgctggtgatcggcaattttggcctctcttgggaccagcaggttacccaaatggctctgtgggcaattatggccggccctcttttcatgagcaacgatctgcgcgcgatctcaccacaggcaaaggccctgctccaagacaaagatgtgatagccatcaatcaggacccgttgggaaagcagggctaccagctgagaaaaggcgacaactttgaggtctgggaaaggcctttgagtggagatgcgtgggctgtggccatgattaatcggcaagagatcggaggtccacgctcctatacaattcctgtagcatctcttggcaagggcgttgcctgtaacccagcttgcttcatcactcagcttctgccggtgaagagaaaactgggtttctacgaagcaaccagcaggctccgatcccacatcaaccctacaggaaccgtcctcttgcagctggagaatacgatgcagacttcactgaaggacctcctg

SEQ ID NO: 688 - protein, 398 aa, Artificial Sequence
  variant of human alpha-galactosidase A
LDNGLARTPPMGWLHWERFMCNLDCQEEPDSCISEKLFMEMAERMVTEGWKDAGYEYLCIDDCWMAPQRDSEGRLQADPQRFPHGIRQLANHVHSKGLKLGIYADVGNKTCAGFPGSFGYYDIDAQTFADWGVDLLKFDGCYCDSLENLADGYKHMSLALNRTGRPIVYSCEWPLYMWPFQKPNYTEIRQYCNHWRNFADIDDSWASIKSILDWTSRNQERIVDVAGPGGWNDPDMLVIGNFGLSWDQQVTQMALWAIMAGPLFMSNDLRAISPQAKALLQDKDVIAINQDPLGKQGYQLRKGDNFEVWERPLSGDAWAVAMINRQEIGGPRSYTIPVASLGKGVACNPACFITQLLPVKRKLGFYEATSRLRSHINPTGTVLLQLENTMQTSLKDLL

SEQ ID NO: 689 - DNA, 1194 bp, Artificial Sequence
  variant of human alpha-galactosidase A
ctggataatggattggctagaacacctcctatggggtggcttcactgggagaggttcatgtgcaacctggactgtcaggaagaaccagacagctgcatctccgagaagctctttatggaaatggccgaactgatggtgactgagggctggaaagatgcaggttacgagtatctgtgtattgacgattgctggatggccccacaacgggattctgagggaagacttcaggctgatccgcagcgcttccctcatggcataaggcagctggcaaactacgtccacagtaaggggctcaaattgggaatctacgcggacgtgggcaataagacctgtgccggttttccgggatcattcgggtattatgacattgacgcccaaacgtttgctgattggggcgttgacctgctgaaattcgatggttgctactgtgacagcctcgaaaacctggcagacggctacaagcatatgtctctcgccctgaatagaaccggtcggtcaatcgtatattcctgcgagtggcctctttacatgtggccatttcagaaaccgaactacacagaaattcgccagtattgcaatcattggaggaacttcgctgatatcgatgactcatgggcctccataaagagcatcttggactggaccagtcggaatcaggagcgaattgtggatgtcgcaggccctggaggatggaacgatccagacatgctggtgatcggcaattttggcctctcttggaatcagcaggttacccaaatggctctgtgggcaattatggccgcccctcttttcatgagcaacgatctgcgcgcgatctcaccacaggcaaaggccctgctccaagacaaagatgtgatagccatcaatcaggacccgttgggaaagcagggctaccagctgagacagggcgacaactttgaggtctgggaaaggcctttgagtggagatgcgtgggctgtggccattattaatcggcaagagatcggaggtccacgctcctatacaattgctgtagcatctcttggcaagggcgttgcctgtaacccagcttgcttcatcactcagcttctgccggtgaagagaaaactgggtttctacgaagcaaccagcaggctccgatcccacatcaaccctacaggaaccgtcctcttgcagctggagaatacgatgcagacttcactgaaggacctcctg

SEQ ID NO: 690 - protein, 398 aa, Artificial Sequence
  variant of human alpha-galactosidase A
LDNGLARTPPMGWLHWERFMCNLDCQEEPDSCISEKLFMEMAELMVTEGWKDAGYEYLCIDDCWMAPQRDSEGRLQADPQRFPHGIRQLANYVHSKGLKLGIYADVGNKTCAGFPGSFGYYDIDAQTFADWGVDLLKFDGCYCDSLENLADGYKHMSLALNRTGRSIVYSCEWPLYMWPFQKPNYTEIRQYCNHWRNFADIDDSWASIKSILDWTSRNQERIVDVAGPGGWNDPDMLVIGNFGLSWNQQVTQMALWAIMAAPLFMSNDLRAISPQAKALLQDKDVIAINQDPLGKQGYQLRQGDNFEVWERPLSGDAWAVAIINRQEIGGPRSYTIAVASLGKGVACNPACFITQLLPVKRKLGFYEATSRLRSHINPTGTVLLQLENTMQTSLKDLL

SEQ ID NO: 691 - DNA, 1194 bp, Artificial Sequence
  variant of human alpha-galactosidase A
ctggataatggattggctagaacacctcccatggggtggcttcactgggagaggttcatgtgcaacctggactgtcaggaagaaccagacagctgcatctccgagaagctctttatggaaatggccgaacggatggtgaccgagggctggaaagatgcaggttacgagtatctgtgtattgacgattgctggatggccccacaacgggattctgagggaagacttcaggctgatccgcagcgcttccctcatggcataaggcagctggcaaaccacgtccacagtaaggggctcaaattgggaatctacgcggacgtgggcaataagacctgtgccggttttccgggatcattcgggtattatgacattgacgcccaaacgtttgctgattggggcgttgacctgctgaaattcgatggttgctactgtgacagcctcgaaaacctggcagacggctacaagcatatgtctctcgccctgaatagaaccggtcggccaatcgtatattcctgcgagtggcctctttacatgtggccatttcagaaaccgaactacacagaaattcgccagtattgcaatcattggaggaacttcgctgatatcgatgactcatgggcctccataaagagcatcttggactggaccagtcggaatcaggagcgaattgtggatgtcgcaggccctggaggatggaacgatccagacatgctggtgatcggcaattttggcctctcttgggaccagcaggttacccaaatggctctgtgggcaattatggccggccctcttttcatgagcaacgatctgcgcgcgatctcaccacaggcaaaggccctgctccaagacaaagatgtgatagccatcaatcaggacccgttgggaaagcagggctaccagctgagaaaaggcgacaactttgaggtctgggaaaggcctttgagtggagatgcgtgggctgtggccattattaatcggcaagagatcggaggtccacgctcctatacaattcctgtagcatctcttggcaagggcgttgcctgtaacccagcttgcttcatcactcagcttctgccggtgaagagaaaactgggtttctacgaagcaaccagcaggctccgatcccacatcaaccctacaggaaccgtcctcttgcagctggagaatacgatgcagatgtcactgaaggacctcctg

SEQ ID NO: 692 - protein, 398 aa, Artificial Sequence
  variant of human alpha-galactosidase A
LDNGLARTPPMGWLHWERFMCNLDCQEEPDSCISEKLFMEMAERMVTEGWKDAGYEYLCIDDCWMAPQRDSEGRLQADPQRFPHGIRQLANHVHSKGLKLGIYADVGNKTCAGFPGSFGYYDIDAQTFADWGVDLLKFDGCYCDSLENLADGYKHMSLALNRTGRPIVYSCEWPLYMWPFQKPNYTEIRQYCNHWRNFADIDDSWASIKSILDWTSRNQERIVDVAGPGGWNDPDMLVIGNFGLSWDQQVTQMALWAIMAGPLFMSNDLRAISPQAKALLQDKDVIAINQDPLGKQGYQLRKGDNFEVWERPLSGDAWAVAIINRQEIGGPRSYTIPVASLGKGVACNPACFITQLLPVKRKLGFYEATSRLRSHINPTGTVLLQLENTMQMSLKDLL

SEQ ID NO: 693 - DNA, 1194 bp, Artificial Sequence
  variant of human alpha-galactosidase A
ctggataatggattggctagaacacctcccatggggtggcttcactgggagaggttcatgtgcaacctggactgtcaggaagaaccagacagctgcatctccgagaagctctttatggaaatggccgaacggatggtgtccgagggctggaaagatgcaggttacgagtatctgtgtattgacgattgctggatggccccacaacgggattctgagggaagacttcaggctgatccgcagcgcttccctcatggcataaggcagctggcaaactacgtccacagtaaggggctcaaattgggaatctacgcggacgtgggcaataagacctgtgccggttttccgggatcattcgggtattatgacattgacgcccaaacgtttgctgattggggcgttgacctgctgaaattcgatggttgctactgtgacagcctcgaaaacctggcagacggctacaagcatatgtctctcgccctgaatagaaccggtcggccaatcgtatattcctgcgagtggcctctttacatgtggccatttcagaaaccgaactacacagaaattcgccagtattgcaatcattggaggaacttcgctgatatcgatgactcatgggcctccataaagagcatcttggactggaccagtcggaatcaggagcgaattgtggatgtcgcaggccctggaggatggaacgatccagacatgctggtgatcggcaattttggcctctcttgggaccagcaggttacccaaatggctctgtgggcaattatggccggtcctcttttcatgagcaacgatctgcgcgcgatctcaccacaggcaaaggccctgctccaagacaaagatgtgatagccatcaatcaggacccgttgggaaagcagggctaccagctgagaaaaggcgacaactttgaggtctgggaaaggcctttgagtggactcgcgtgggctgtggccatgattaatcggcaagagatcggaggtccacgctcctatacaattcctgtagcatctcttggcaagggcgttgcctgtaacccagcttgcttcatcactcagcttctgccggtgaagagaaaactgggtttctacgaagctaccagcaggctccgatcccacatcaaccctacaggaaccgtcctcttgcagctggagaatacgatgcagacctcactgaaggacctcctg

SEQ ID NO: 694 - protein, 398 aa, Artificial Sequence
  variant of human alpha-galactosidase A
LDNGLARTPPMGWLHWERFMCNLDCQEEPDSCISEKLFMEMAERMVSEGWKDAGYEYLCIDDCWMAPQRDSEGRLQADPQRFPHGIRQLANYVHSKGLKLGIYADVGNKTCAGFPGSFGYYDIDAQTFADWGVDLLKFDGCYCDSLENLADGYKHMSLALNRTGRPIVYSCEWPLYMWPFQKPNYTEIRQYCNHWRNFADIDDSWASIKSILDWTSRNQERIVDVAGPGGWNDPDMLVIGNFGLSWDQQVTQMALWAIMAGPLFMSNDLRAISPQAKALLQDKDVIAINQDPLGKQGYQLRKGDNFEVWERPLSGLAWAVAMINRQEIGGPRSYTIPVASLGKGVACNPACFITQLLPVKRKLGFYEATSRLRSHINPTGTVLLQLENTMQTSLKDLL

SEQ ID NO: 695 - DNA, 1194 bp, Artificial Sequence
  variant of human alpha-galactosidase A
ctggataatggattggctagaacacctcctatggggtggcttcactgggagaggttcatgtgcaacctggactgtcaggaagaaccagacagctgcatctccgagaagctctttgaggaaatggccgaacgaatggtgactgagggctggaaagatgcaggttacgagtatctgtgtattgacgattgctggatggccccacaacgggattctgagggaagacttcaggctgatccgcagcgcttccctcatggcataaggcagctggcaaactacgtccacagtaaggggctcaaattgggaatctacgcggacgtgggcaataagacctgtgccggttttccgggatcattcgggtattatgacattgacgcccaaacgtttgctgattggggcgttgacctgctgaaattcgatggttgctactgtgacagcctcgaaaacctggcagacggctacaagcatatgtctctcgccctgaatagaaccggtcggccaatcgtatattcctgcgagtggcctctttacatgtggccatttcagaaaccgaactacacagaaattcgccagtattgcaatcattggaggaacttcgctgatatcgatgactcatgggcctccataaagagcatcttggactggaccagtcggaatcaggagcgaattgtggatgtcgcaggccctggaggatggaacgatccagacatgctggtgatcggcaattttggcctctcttgggaccagcaggttacccaaatggctctgtgggcaattatggccggccctcttttcatgagcaacgatctgcgccatatctcaccacaggcaaaggccctgctccaagacaaagatgtgatagccatcaatcaggacccgttgggaaagcagggctaccagctgagaaaaggcgacaactttgaggtctgggaaaggcctttgagtggagatgcgtgggctgtggccattattaatcggcaagagatcggaggtccacgctcctatacaattcctgtagcatctcttggcaagggcgttgcctgtaacccagcttgcttcatcactcagcttctgccggtgaagagaaaactgggtttctacgaagctaccagcaggctccgatcccacatcaaccctacaggaaccgtcctcttgcagctggagaatacgatgcagacttcactgaaggacctcctg

SEQ ID NO: 696 - protein, 398 aa, Artificial Sequence
  variant of human alpha-galactosidase A
LDNGLARTPPMGWLHWERFMCNLDCQEEPDSCISEKLFEEMAERMVTEGWKDAGYEYLCIDDCWMAPQRDSEGRLQADPQRFPHGIRQLANYVHSKGLKLGIYADVGNKTCAGFPGSFGYYDIDAQTFADWGVDLLKFDGCYCDSLENLADGYKHMSLALNRTGRPIVYSCEWPLYMWPFQKPNYTEIRQYCNHWRNFADIDDSWASIKSILDWTSRNQERIVDVAGPGGWNDPDMLVIGNFGLSWDQQVTQMALWAIMAGPLFMSNDLRHISPQAKALLQDKDVIAINQDPLGKQGYQLRKGDNFEVWERPLSGDAWAVAIINRQEIGGPRSYTIPVASLGKGVACNPACFITQLLPVKRKLGFYEATSRLRSHINPTGTVLLQLENTMQTSLKDLL

SEQ ID NO: 697 - DNA, 1194 bp, Artificial Sequence
  variant of human alpha-galactosidase A
ctggataatggattggctagaacacctaccatggggtggcttcactgggagaggttcatgtgcaacctggactgtcaggaagaaccagacagctgcatctccgagaagctctttatggaaatggccgaacggatggtgactgagggctggaaagatgcaggttacgagtatctgtgtattgacgattgctggatggccccacaacgggattctgagggaagacttcaggctgatccgcagcgcttccctcatggcataaggcagctggcaaaccacgtccacagtaaggggctcaaattgggaatctacgcggacgtgggcaataagacctgtgccggttttccgggatcattcgggtattatgacattgacgcccaaacgtttgctgattggggcgttgacctgctgaaattcgatggttgctactgtgacagcctcgaaaacctggcagacggctacaagcatatgtctctcgccctgaatagaaccggtcggccaatcgtatattcctgcgagtggcctctttacatgtggccatttcagaaaccgaactacacagaaattcgccagtattgcaatcattggaggaacttcgctgatatcgatgactcatgggcctccataaagagcatcttggactggaccagtcggaatcaggagcgaattgtggatgtcgcaggccctggaggatggaacgatccagacatgctggtgatcggcaattttggcctctcttgggaccagcaggttacccaaatggctctgtgggcaattatggccggtcctcttttcatgagcaacgatctgcgcgcgatctcaccacaggcaaaggccctgctccaagacaaagatgtgatagccatcaatcaggacccgttgggaaagcagggctaccagctgagaaagggcgacaactttgaggtctgggaaaggcctttgagtggagatgcgtgggctgtggccattattaatcggcaagagatcggaggtccacgctcctatacaattcctgtagcatctcttggcaagggcgttgcctgtaacccagcttgcttcatcactcagcttctgccggtgaagagaaaactgggtttctacgaagctaccagcaggctccgatcccacatcaaccctacaggaaccgtcctcttgcagctggagaatacgatgcagacttcactgaaggacctcctg

SEQ ID NO: 698 - protein, 398 aa, Artificial Sequence
  variant of human alpha-galactosidase A
LDNGLARTPTMGWLHWERFMCNLDCQEEPDSCISEKLFMEMAERMVTEGWKDAGYEYLCIDDCWMAPQRDSEGRLQADPQRFPHGIRQLANHVHSKGLKLGIYADVGNKTCAGFPGSFGYYDIDAQTFADWGVDLLKFDGCYCDSLENLADGYKHMSLALNRTGRPIVYSCEWPLYMWPFQKPNYTEIRQYCNHWRNFADIDDSWASIKSILDWTSRNQERIVDVAGPGGWNDPDMLVIGNFGLSWDQQVTQMALWAIMAGPLFMSNDLRAISPQAKALLQDKDVIAINQDPLGKQGYQLRKGDNFEVWERPLSGDAWAVAIINRQEIGGPRSYTIPVASLGKGVACNPACFITQLLPVKRKLGFYEATSRLRSHINPTGTVLLQLENTMQTSLKDLL

SEQ ID NO: 699 - DNA, 1194 bp, Artificial Sequence
  variant of human alpha-galactosidase A
ctggataatggattggctagaacacctaccatggggtggcttcactgggagaggttcatgtgcaacctggactgtcaggaagaaccagacagctgcatctccgagaagctctttgaggaaatggccgaacgaatggtgaccgagggctggaaagatgcaggttacgagtatctgtgtattgacgattgctggatggccccacaacgggattctgagggaagacttcaggctgatccgcagcgcttccctcatggcataaggcagctggcaaaccacgtccacagtaaggggctcaaattgggaatctacgcggacgtgggcaataagacctgtgccggttttccgggatcattcgggtattatgacattgacgcccaaacgtttgctgattggggcgttgacctgctgaaattcgatggttgctactgtgacagcctcgaaaacctggcagacggctacaagcatatgtctctcgccctgaatagaaccggtcggccaatcgtatattcctgcgagtggcctctttacatgtggccatttcagaaaccgaactacacagaaattcgccagtattgcaatcattggaggaacttcgctgatatcgatgactcatgggcctccataaagagcatcttggactggaccagtcggaatcaggagcgaattgtggatgtcgcaggccctggaggatggaacgatccagacatgctggtgatcggcaattttggcctctcttgggatcagcaggttacccaaatggctctgtgggcaattatggccgcccctcttttcatgagcaacgatctgcgcgctatctcaccacaggcaaaggccctgctccaagacaaagatgtgatagccatcaatcaggacccgttgggaaagcagggctaccagctgagaaaaggcgacaactttgaggtctgggaaaggcctttgagtggagatgcgtgggctgtggccataattaatcggcaagagatcggaggtccacgctcctatacaattcctgtagcatctcttggcaagggcgttgcctgtaacccagcttgcttcatcactcagcttctgccggtgaagagaaaactgggtttctacgaagctaccagcaggctccgatcccacatcaaccctacaggaaccgtcctcttgcagctggagaatacgatgcagacctcactgaaggacctcctg

SEQ ID NO: 700 - protein, 398 aa, Artificial Sequence
  variant of human alpha-galactosidase A
LDNGLARTPTMGWLHWERFMCNLDCQEEPDSCISEKLFEEMAERMVTEGWKDAGYEYLCIDDCWMAPQRDSEGRLQADPQRFPHGIRQLANHVHSKGLKLGIYADVGNKTCAGFPGSFGYYDIDAQTFADWGVDLLKFDGCYCDSLENLADGYKHMSLALNRTGRPIVYSCEWPLYMWPFQKPNYTEIRQYCNHWRNFADIDDSWASIKSILDWTSRNQERIVDVAGPGGWNDPDMLVIGNFGLSWDQQVTQMALWAIMAAPLFMSNDLRAISPQAKALLQDKDVIAINQDPLGKQGYQLRKGDNFEVWERPLSGDAWAVAIINRQEIGGPRSYTIPVASLGKGVACNPACFITQLLPVKRKLGFYEATSRLRSHINPTGTVLLQLENTMQTSLKDLL

SEQ ID NO: 701 - DNA, 1194 bp, Artificial Sequence
  variant of human alpha-galactosidase A
ctggataatggattggctagaacacctaccatggggtggcttcactgggagaggttcatgtgcaacctggactgtcaggaagaaccagacagctgcatctccgagaagctctttgaagaaatggccgaacggatggtgaccgagggctggaaagatgcaggttacgagtatctgtgtattgacgattgctggatggccccacaacgggattctgagggaagacttcaggctgatccgcagcgcttccctcatggcataaggcagctggcaaactacgtccacagtaaggggctcaaattgggaatctacgcggacgtgggcaataagacctgtgccggttttccgggatcattcgggtattatgacattgacgcccaaacgtttgctgattggggcgttgacctgctgaaattcgatggttgctactgtgacagcctcgaaaacctggcagacggctacaagcatatgtctctcgccctgaatagaaccggtcggtcaatcgtatattcctgcgagtggcctctttacatgtggccatttcagaaaccgaactacacagaaattcgccagtattgcaatcattggaggaacttcgctgatatcgatgactcatgggcctccataaagagcatcttggactggaccagtcggaatcaggagcgaattgtggatgtcgcaggccctggaggatggaacgatccagacatgctggtgatcggcaattttggcctctcttgggatcagcaggttacccaaatggctctgtgggcaattatggccgcccctcttttcatgagcaacgatctgcgcgcgatctcaccacaggcaaaggccctgctccaagacaaagatgtgatagccatcaatcaggacccgttgggaaagcagggctaccagctgagaaaaggcgacaactttgaggtctgggaaaggcctttgagtggactcgcgtgggctgtggccatgattaatcggcaagagatcggaggtccacgctcctatacaattgctgtagcatctcttggcaagggcgttgcctgtaacccagcttgcttcatcactcagcttctgccggtgaagagaaaactgggtttctacgaagctaccagcaggctccgatcccacatcaaccctacaggaaccgtcctcttgcagctggagaatacgatgcagacttcactgaaggacctcctg

SEQ ID NO: 702 - protein, 398 aa, Artificial Sequence
  variant of human alpha-galactosidase A
LDNGLARTPTMGWLHWERFMCNLDCQEEPDSCISEKLFEEMAERMVTEGWKDAGYEYLCIDDCWMAPQRDSEGRLQADPQRFPHGIRQLANYVHSKGLKLGIYADVGNKTCAGFPGSFGYYDIDAQTFADWGVDLLKFDGCYCDSLENLADGYKHMSLALNRTGRSIVYSCEWPLYMWPFQKPNYTEIRQYCNHWRNFADIDDSWASIKSILDWTSRNQERIVDVAGPGGWNDPDMLVIGNFGLSWDQQVTQMALWAIMAAPLFMSNDLRAISPQAKALLQDKDVIAINQDPLGKQGYQLRKGDNFEVWERPLSGLAWAVAMINRQEIGGPRSYTIAVASLGKGVACNPACFITQLLPVKRKLGFYEATSRLRSHINPTGTVLLQLENTMQTSLKDLL

SEQ ID NO: 703 - DNA, 1194 bp, Artificial Sequence
  variant of human alpha-galactosidase A
ctggataatggattggctagaacacctcctatggggtggcttcactgggagaggttcatgtgcaacctggactgtcaggaagaaccagacagctgcatctccgagaagctctttgaggaaatggccgaacgaatggtgactgacggctggaaagatgcaggttacgagtatctgtgtattgacgattgctggatggccccacaacgggattctgagggaagacttcaggctgatccgcagcgcttccctcatggcataaggcagctggcaaaccacgtccacagtaaggggctcaaattgggaatctacgcggacgtgggcaataagacctgtgccggttttccgggatcattcgggtattatgacattgacgcccaaacgtttgctgattggggcgttgacctgctgaaattcgatggttgctactgtgacagcctcgaaaacctggcagacggctacaagcatatgtctctcgccctgaataaaaccggtcggccaatcgtatattcctgcgagtggcctctttacatgtggccatttcagaaaccgaactacacagaaattcgccagtattgcaatcattggaggaacttcgctgatatcgatgactcatgggcctccataaagagcatcttggactggaccagtcggaatcaggagcgaattgtggatgtcgcaggccctggaggatggaacgatccagacatgctggtgatcggcaattttggcctctcttgggaccagcaggttacccaaatggctctgtgggcaattatggccggtcctcttttcatgagcaacgatctgcgcgcgatctcaccacaggcaaaggccctgctccaagacaaagatgtgatagccatcaatcaggacccgttgggaaagcagggctaccagctgagaaaaggcgacaactttgaggtctgggaaaggcctttgagtggagatgcgtgggctgtggccattattaatcggcaagagatcggaggtccacgcggttatacaattcctgtagcatctcttggcaagggcgttgcctgtaacccagcttgcttcatcactcagcttctgccggtgaagagaaaactgggtttctacgaagctaccagcaggctccgatcccacatcaaccctacaggaaccgtcctcttgcagctggagaatacgatgcagacttcactgaaggacctcctg

SEQ ID NO: 704 - protein, 398 aa, Artificial Sequence; identical to SEQ ID NO: 276
  variant of human alpha-galactosidase A

SEQ ID NO: 705 - DNA, 1194 bp, Artificial Sequence
  variant of human alpha-galactosidase A
ctggataatggattggctagaacacctcctatggggtggcttcactgggagaggttcatgtgcaacctggactgtcaggaagaaccagacagctgcatctccgagaagctctttgaggaaatggccgaacgaatggtgactgacggctggaaagatgcaggttacgagtatctgtgtattgacgattgctggatggccccacaacgggattctgagggacgtcttcaggctgatccgcagcgcttccctcatggcataaggcagctggcaaaccacgtccacagtaaggggctcaaattgggaatctacgcggacgtgggcaataagacctgtgccggttttccgggatcattcgggtattatgacattgacgcccaaacgtttgctgattggggcgttgacctgctgaaattcgatggttgctactgtgacagcctcgaaaacctggcagacggctacaagcatatgtctctcgccctgaataaaaccggtcggccaatcgtatattcctgcgagtggcctctttacatgtggccatttcagaaaccgaactacacagaaattcgccagtattgcaatcattggaggaacttcgctgatatcgatgactcatgggcctccataaagagcatcttggactggaccagtcggaaccaggagcgaattgtggatgtcgcaggccctggaggatggaacgatccagacatgctggtgatcggcaattttggcctctcttgggaccagcaggttacccaaatgactctgtgggcaattatggccggtcctcttttcatgagcaacgatctgcgcgcgatctcaccacaggcaaaggccctgctccaagacaaagatgtgatagccatcaatcaggacccgttgggaaagcagggctaccagctgagaaaaggcgacaactttgaggtctgggaaaggcctttgagtggagatgcgtgggctgtggccattattaatcggcaagagatcggaggtccacgcggttatacaattcctgtagcatctcttggcaagggcgttgcctgtaacccagcttgcttcatcactcagcttctgccggtgaagcgtaaactgggtttctacgaagctaccagcaggctccgatcccacatcaaccctacaggaaccgttctcttgcagctggagaatacgatgcagacttcactgaaggacctcttt

SEQ ID NO: 706 - protein, 398 aa, Artificial Sequence
  variant of human alpha-galactosidase A
LDNGLARTPPMGWLHWERFMCNLDCQEEPDSCISEKLFEEMAERMVTDGWKDAGYEYLCIDDCWMAPQRDSEGRLQADPQRFPHGIRQLANHVHSKGLKLGIYADVGNKTCAGFPGSFGYYDIDAQTFADWGVDLLKFDGCYCDSLENLADGYKHMSLALNKTGRPIVYSCEWPLYMWPFQKPNYTEIRQYCNHWRNFADIDDSWASIKSILDWTSRNQERIVDVAGPGGWNDPDMLVIGNFGLSWDQQVTQMTLWAIMAGPLFMSNDLRAISPQAKALLQDKDVIAINQDPLGKQGYQLRKGDNFEVWERPLSGDAWAVAIINRQEIGGPRGYTIPVASLGKGVACNPACFITQLLPVKRKLGFYEATSRLRSHINPTGTVLLQLENTMQTSLKDLF

SEQ ID NO: 707 - DNA, 1194 bp, Artificial Sequence
  variant of human alpha-galactosidase A
ctggataatggattggctagaacacctcctatggggtggcttcactgggagaggttcatgtgcaacctggattgtcaggaagaaccagacagctgcatctccgagaagctctttgaggaaatggccgaacgaatggtgactgacggctggaaagatgcaggttacgagtatctgtgtattgacgattgctggatggccccacaacgggattctgagggaagacttcaggctgatccgcagcgcttccctcatggcataaggcagctggcaaaccacgtccacagtaaggggctcaaattgggaatctacgcggacgtgggcaataagacctgtgccggttttccgggatcattcgggtattatgacattgacgcccaaacgtttgctgattggggcgttgacctgctgaaattcgatggttgctactgtgacagcctcgaaaacctggcagacggctacaagcatatgtctctcgccctgaataaaaccggtcggccaatcgtatattcctgcgagtggcctctttacatgtggccatttcagaaaccgaactacacagaaattcgccagtattgcaatcattggaggaacttcgctgatatcgatgactcatgggcctccataaagagcatcttggactggaccagtcggaatcaggagcgaattgtggatgtcgcaggccctggaggatggaacgatccagacatgctggtgatcggcaattttggcctctcttgggaccagcaggttacccaaatggctctgtgggcaattatggccggtcctcttttcatgagcaacgatctgcgcaacatctcaccacaggcaaaggccctgctccaagacaaagatgtgatagccatcaatcaggacccgttgggaaagcagggctaccagctgagaaaaggcgacaactttgaggtctgggaaaggcctttgagtggagatgcgtgggctgtggccattattaatcggcaagagatcggaggtccacgcggttatacaattcctgtagcatctcttggcaagggcgttgcctgtaacccagcttgcttcatcactcagcttctgccggtgaagagaaaactgggtttctacgaagctaccagcaggctccgatcccacatcaaccctacaggaaccgtcctcttgcagctggagaatacgatgcagacttcactgaaggacctcctg

SEQ ID NO: 708 - protein, 398 aa, Artificial Sequence
  variant of human alpha-galactosidase A
LDNGLARTPPMGWLHWERFMCNLDCQEEPDSCISEKLFEEMAERMVTDGWKDAGYEYLCIDDCWMAPQRDSEGRLQADPQRFPHGIRQLANHVHSKGLKLGIYADVGNKTCAGFPGSFGYYDIDAQTFADWGVDLLKFDGCYCDSLENLADGYKHMSLALNKTGRPIVYSCEWPLYMWPFQKPNYTEIRQYCNHWRNFADIDDSWASIKSILDWTSRNQERIVDVAGPGGWNDPDMLVIGNFGLSWDQQVTQMALWAIMAGPLFMSNDLRNISPQAKALLQDKDVIAINQDPLGKQGYQLRKGDNFEVWERPLSGDAWAVAIINRQEIGGPRGYTIPVASLGKGVACNPACFITQLLPVKRKLGFYEATSRLRSHINPTGTVLLQLENTMQTSLKDLL

SEQ ID NO: 709 - DNA, 1194 bp, Artificial Sequence
  variant of human alpha-galactosidase A
ctggataatggattggctagaacacctcctatggggtggcttcactgggagaggttcatgtgcaacctggattgtcaggaagaaccagacagctgcatctccgagaagctctttgaggaaatggccgaacgaatggtgactgacggctggaaagatgcaggttacgagtatctgtgcattgacgattgctggatggccccacaacgggattctgagggaagacttcaggctgatccgcagcgcttccctcatggcataaggcagctggcaaaccacgtccacagtaaggggctcaaattgggaatctacgcggacgtgggcaataagacctgtgccggttttccgggatcattcgggtattatgacattgacgcccaaacgtttgctgattggggcgttgacctgctgaaattcgatggttgctactgtgacagcctcgaaaacctggcagacggctacaagcatatgtctctcgccctgaataaaaccggtcggccaatcgtatattcctgcgagtggcctctttacatgtggccatttcagaaaccgaactacacagaaattcgccagtattgcaatcattggaggaacttcgctgatatcgatgactcatgggcctccataaagagcatcttggactggaccagtcggaatcaggagcgaattgtggatgtcgcaggccctggaggatggaacgatccagacatgctggtgatcggcaattttggcctctcttgggaccagcaggttacccaaatggctctgtgggcaattatggccggtcctcttttcatgagcaacgatctgcgcaacatctcaccacaggcaaaggccctgctccaagacaaagatgtgatagccatcaatcaggacccgttgggaaagcagggctaccagctgagaaaaggcgacaactttgaggtctgggaaaggcctttgagtggagatgcgtgggctgtggccattattaatcggcaagagatcggaggtccacgcgggtatacaattcctgtagcatctcttggcaagggcgttgcctgtaacccagcttgcaatatcactcagcttctgccggtgaagagaaaactgggtttctacgaagctaccagcaggctccgatcccacatcaaccctacaggaaccgtcctcttgcagctggaaaatacgatgaacacttcactgaaggacctcctg

SEQ ID NO: 710 - protein, 398 aa, Artificial Sequence
  variant of human alpha-galactosidase A
LDNGLARTPPMGWLHWERFMCNLDCQEEPDSCISEKLFEEMAERMVTDGWKDAGYEYLCIDDCWMAPQRDSEGRLQADPQRFPHGIRQLANHVHSKGLKLGIYADVGNKTCAGFPGSFGYYDIDAQTFADWGVDLLKFDGCYCDSLENLADGYKHMSLALNKTGRPIVYSCEWPLYMWPFQKPNYTEIRQYCNHWRNFADIDDSWASIKSILDWTSRNQERIVDVAGPGGWNDPDMLVIGNFGLSWDQQVTQMALWAIMAGPLFMSNDLRNISPQAKALLQDKDVIAINQDPLGKQGYQLRKGDNFEVWERPLSGDAWAVAIINRQEIGGPRGYTIPVASLGKGVACNPACNITQLLPVKRKLGFYEATSRLRSHINPTGTVLLQLENTMNTSLKDLL

SEQ ID NO: 711 - DNA, 1194 bp, Artificial Sequence
  variant of human alpha-galactosidase A
ctggataatggattggctagaacacctcctatggggtggcttcactgggagaggttcatgtgcaacctggactgtcaggaagaaccagacagctgcatctccgagaagctctttgaggaaatggccgaacgaatggtgactgacggctggaaagatgcaggttacgagtatctgtgtattgacgattgctggatggccccacaacgggattctgagggaagacttcaggctgatccgcagcgcttccctcatggcataaggcagctggcaaaccacgtccacagtaaggggctcaaattgggaatctacgcggacgtgggcaataagacctgtgccggttttccgggatcattcgggtattatgacattgacgcccaaacgtttgctgattggggcgttgacctgctgaaattcgatggttgctactgtgacagcctcgaaaacctggcagacggctacaagcatatgtctctcgccctgaataaaaccggtcggccaatcgtatattcctgcgagtggcctctttacatgtggccatttcagaaaccgaactacacagaaattcgccagtattgcaatcattggaggaacttcgctgatatcgatgactcatgggcctccataaagagcatcttggactggaccagtcggaatcaggagcgaattgtggatgtcgcaggccctggaggatggaacgatccagacatgctggtgatcggcaattttggcctctcttgggaccagcaggttacccaaatggctctgtgggcaattatggccggtcctcttttcatgagcaacgatctgcgcaacatctcaccacaggcaaaggccctgctccaagacaaagatgtgatagccatcaatcaggacccgttgggaaagcagggctaccagctgagaaaaggcgacaactttgaggtctgggaaaggcctttgagtggagatgcgtgggctgtggccattattaatcggcaagagatcggaggtccacgcaattatacaattcctgtagcatctcttggcaagggcgttgcctgtaacccagcttgcttcatcactcagcttctgccggtgaagagaaaactgggtttctacgaagctaccagcaggctccgatcccacatcaaccctacaggaaccgtcctcttgcagctggagaatacgatgcagacttcactgaaggacctcctg

SEQ ID NO: 712 - protein, 398 aa, Artificial Sequence
  variant of human alpha-galactosidase A
LDNGLARTPPMGWLHWERFMCNLDCQEEPDSCISEKLFEEMAERMVTDGWKDAGYEYLCIDDCWMAPQRDSEGRLQADPQRFPHGIRQLANHVHSKGLKLGIYADVGNKTCAGFPGSFGYYDIDAQTFADWGVDLLKFDGCYCDSLENLADGYKHMSLALNKTGRPIVYSCEWPLYMWPFQKPNYTEIRQYCNHWRNFADIDDSWASIKSILDWTSRNQERIVDVAGPGGWNDPDMLVIGNFGLSWDQQVTQMALWAIMAGPLFMSNDLRNISPQAKALLQDKDVIAINQDPLGKQGYQLRKGDNFEVWERPLSGDAWAVAIINRQEIGGPRNYTIPVASLGKGVACNPACFITQLLPVKRKLGFYEATSRLRSHINPTGTVLLQLENTMQTSLKDLL

SEQ ID NO: 713 - DNA, 1194 bp, Artificial Sequence
  variant of human alpha-galactosidase A
ctggataatggattggctagaacacctcctatggggtggcttcactgggagaggttcatgtgcaacctggattgtcaggaagaaccagacagctgcatctccgagaagctctttgaggaaatggccgaacgaatggtgactgacggctggaaagatgcaggttacgagtatctgtgtattgacgattgctggatggccccacaacgggattctgagggaagacttcaggctgatccgcagcgcttccctcatggcataaggcagctggcaaaccacgtccacagtaaggggctcaaattgggaatctacgcggacgtgggcaataagacctgtgccggttttccgggatcattcgggtattatgacattgacgcccaaacgtttgctgattggggcgttgacctgctgaaattcgatggttgctactgtgacagcctcgaaaacctggcagacggctacaagcatatgtctctcgccctgaataaaaccggtcggccaatcgtatattcctgcgagtggcctctttacatgtggccatttcagaaaccgaactacacagaaattcgccagtattgcaatcattggaggaacttcgctgatatcgatgactcatgggcctccataaagagcatcttggactggaccagtcggaatcaggagcgaattgtggatgtcgcaggccctggaggatggaacgatccagacatgctggtgatcggcaattttggcctctcttgggaccagcaggttacccaaatggctctgtgggcaattatggccggtcctcttttcatgagcaacgatctgcgcaacatctcaccacaggcaaaggccctgctccaagacaaagatgtgatagccatcaatcaggacccgttgggaaagcagggctaccagctgagaaaaggcgacaactttgaggtctgggaaaggcctttgagtggagatgcgtgggctgtggccattattaatcggcaagagatcggaggtccacgcaattatacaattcctgtagcatctcttggcaagggcgttgcctgtaacccagcttgctttatcactcagcttctgccggtgaagagaaaactgggtttctacgaagctaccagcaggctccgatcccacatcaaccctacaggaaccgtcctcttgcagctggaaaatacgaataacacttcactgaaggacctcctg

SEQ ID NO: 714 - protein, 398 aa, Artificial Sequence
  variant of human alpha-galactosidase A
LDNGLARTPPMGWLHWERFMCNLDCQEEPDSCISEKLFEEMAERMVTDGWKDAGYEYLCIDDCWMAPQRDSEGRLQADPQRFPHGIRQLANHVHSKGLKLGIYADVGNKTCAGFPGSFGYYDIDAQTFADWGVDLLKFDGCYCDSLENLADGYKHMSLALNKTGRPIVYSCEWPLYMWPFQKPNYTEIRQYCNHWRNFADIDDSWASIKSILDWTSRNQERIVDVAGPGGWNDPDMLVIGNFGLSWDQQVTQMALWAIMAGPLFMSNDLRNISPQAKALLQDKDVIAINQDPLGKQGYQLRKGDNFEVWERPLSGDAWAVAIINRQEIGGPRNYTIPVASLGKGVACNPACFITQLLPVKRKLGFYEATSRLRSHINPTGTVLLQLENTNNTSLKDLL

SEQ ID NO: 715 - DNA, 1194 bp, Artificial Sequence
  variant of human alpha-galactosidase A
ctggataatggattggctagaacacctcctatggggtggcttcactgggagaggttcatgtgcaacctggactgtcaggaagaaccagacagctgcatctccgagaagctctttgaggaaatggccgaacgaatggtgactgacggctggaaagatgcaggttacgagtatctgtgtattgacgattgctggatggccccacaacgggattctgagggaagacttcaggctgatccgcagcgcttccctcatggcataaggcagctggcaaaccacgtccacagtaaggggctcaaattgggaatctacgcggacgtgggcaataagacctgtgccggttttccgggatcattcgggtattatgacattgacgcccaaacgtttgctgattggggcgttgacctgctgaaattcgatggttgctactgtgacagcctcgaaaacctggcagacggctacaagcatatgtctctcgccctgaataaaaccggtcggccaatcgtatattcctgcgagtggcctctttacatgtggccatttcagaaaccgaactacacagaaattcgccagtattgcaatcattggaggaacttcgctgatatcgatgactcatgggcctccataaagagcatcttggactggaccagtcggaatcaggagcgaattgtggatgtcgcaggccctggaggatggaacgatccagacatgctggtgatcggcaattttggcctctcttgggaccagcaggttacccaaatggctctgtgggcaattatggccggtcctcttttcatgagcaacgatctgcgcaacatctcaccacaggcaaaggccctgctccaagacaaagatgtgatagccatcaatcaggacccgttgggaaagcagggctaccagctgagaaaaggcgacaactttgaggtctgggaaaggcctttgagtggagatgcgtgggctgtggccattattaatcggcaagagatcggaggtccacgcaattatacaattcctgtagcatctcttggcaagggcgttgcctgtaacccagcttgcttcatcactcagcttctgccggtgaagagaaaactgggtttctacgaagctaccagcaggctccgatcccacatcaaccctacaggaaccgtcctcttgcagctggagaatacgatgaacacttcactgaaggacctcctg

SEQ ID NO: 716 - protein, 398 aa, Artificial Sequence
  variant of human alpha-galactosidase A
LDNGLARTPPMGWLHWERFMCNLDCQEEPDSCISEKLFEEMAERMVTDGWKDAGYEYLCIDDCWMAPQRDSEGRLQADPQRFPHGIRQLANHVHSKGLKLGIYADVGNKTCAGFPGSFGYYDIDAQTFADWGVDLLKFDGCYCDSLENLADGYKHMSLALNKTGRPIVYSCEWPLYMWPFQKPNYTEIRQYCNHWRNFADIDDSWASIKSILDWTSRNQERIVDVAGPGGWNDPDMLVIGNFGLSWDQQVTQMALWAIMAGPLFMSNDLRNISPQAKALLQDKDVIAINQDPLGKQGYQLRKGDNFEVWERPLSGDAWAVAIINRQEIGGPRNYTIPVASLGKGVACNPACFITQLLPVKRKLGFYEATSRLRSHINPTGTVLLQLENTMNTSLKDLL

SEQ ID NO: 717 - DNA, 1194 bp, Artificial Sequence
  variant of human alpha-galactosidase A
ctggataatggattggctagaacacctcctatggggtggcttcactgggagaggttcatgtgcaacctggactgtcaggaagaaccagacagctgcatctccgagaagctctttgaggaaatggccgaacgaatggtgactgacggctggaaagatgcaggttacgagtatctgtgtattgacgattgctggatggccccacaacgggattctgagggaagacttcaggctgatccgcagcgcttccctcatggcataaggcagctggcaaaccacgtccacagtaaggggctcaaattgggaatctacgcggacgtgggcaataagacctgtgccggttttccgggatcattcgggtattatgacattgacgcccaaacgtttgctgattggggcgttgacctgctgaaattcgatggttgctactgtgacagcctcgaaaacctggcagacggctacaagcatatgtctctcgccctgaataaaaccggtcggccaatcgtatattcctgcgagtggcctctttacatgtggccatttcagaaaccgaactacacagaaattcgccagtattgcaatcattggaggaacttcgctgatatcgatgactcatgggcctccataaagagcatcttggactggaccagtcggaatcaggagcgaattgtggatgtcgcaggccctggaggatggaacgatccagacatgctggtgatcggcaattttggcctctcttgggaccagcaggttacccaaatggctctgtgggcaattatggccggtcctcttttcatgagcaacgatctgcgcgcgatctcaccacaggcaaagaatctgctccaagacaaagatgtgatagccatcaatcaggacccgttgggaaagcagggctaccagctgagaaaaggcgacaactttgaggtctgggaaaggcctttgagtggagatgcgtgggctgtggccattattaatcggcaagagatcggaggtccacgcggttatacaattcctgtagcatctcttggcaagggcgttgcctgtaacccagcttgcttcatcactcagcttctgccggtgaagagaaaactgggtttctacgaagctaccagcaggctccgatcccacatcaaccctacaggaaccgtcctcttgcagctggagaatacgatgcagacttcactgaaggacctcctg

SEQ ID NO: 718 - protein, 398 aa, Artificial Sequence
  variant of human alpha-galactosidase A
LDNGLARTPPMGWLHWERFMCNLDCQEEPDSCISEKLFEEMAERMVTDGWKDAGYEYLCIDDCWMAPQRDSEGRLQADPQRFPHGIRQLANHVHSKGLKLGIYADVGNKTCAGFPGSFGYYDIDAQTFADWGVDLLKFDGCYCDSLENLADGYKHMSLALNKTGRPIVYSCEWPLYMWPFQKPNYTEIRQYCNHWRNFADIDDSWASIKSILDWTSRNQERIVDVAGPGGWNDPDMLVIGNFGLSWDQQVTQMALWAIMAGPLFMSNDLRAISPQAKNLLQDKDVIAINQDPLGKQGYQLRKGDNFEVWERPLSGDAWAVAIINRQEIGGPRGYTIPVASLGKGVACNPACFITQLLPVKRKLGFYEATSRLRSHINPTGTVLLQLENTMQTSLKDLL

SEQ ID NO: 719 - DNA, 1194 bp, Artificial Sequence
  variant of human alpha-galactosidase A
ctggataatggattggctagaacacctcctatggggtggcttcactgggagaggttcatgtgcaacctggactgtcaggaagaaccagacagctgcatctccgagaagctctttgaggaaatggccgaacgaatggtgactgacggctggaaagatgcaggttacgagtatctgtgtattgacgattgctggatggccccacaacgggattctgagggaagacttcaggctgatccgcagcgcttccctcatggcataaggcagctggcaaaccacgtccacagtaaggggctcaaattgggaatctacgcggacgtgggcaataagacctgtgccggttttccgggatcattcgggtattatgacattgacgcccaaacgtttgctgattggggcgttgacctgctgaaattcgatggttgctactgtgacagcctcgaaaacctggcagacggctacaagcatatgtctctcgccctgaataaaaccggtcggccaatcgtatattcctgcgagtggcctctttacatgtggccatttcagaaaccgaactacacagaaattcgccagtattgcaatcattggaggaacttcgctgatatcgatgactcatgggcctccataaagagcatcttggactggaccagtcggaatcaggagcgaattgtggatgtcgcaggccctggaggatggaacgatccagacatgctggtgatcggcaattttggcctctcttgggaccagcaggttacccaaatggctctgtgggcaattatggccggtcctcttttcatgagcaacgatctgcgcgcgatctcaccacaggcaaagaggctgctccaagacaaagatgtgatagccatcaatcaggacccgttgggaaagcagggctaccagctgagaaaaggcgacaactttgaggtctgggaaaggcctttgagtggagatgcgtgggctgtggccattattaatcggcaagagatcggaggtccacgcggttatacaattcctgtagcatctcttggcaagggcgttgcctgtaacccagcttgcttcatcactcagcttctgccggtgaagagaaaactgggtttctacgaagctaccagcaggctccgatcccacatcaaccctacaggaaccgtcctcttgcagctggagaatacgatgcagacttcactgaaggacctcctg

SEQ ID NO: 720 - protein, 398 aa, Artificial Sequence
  variant of human alpha-galactosidase A
LDNGLARTPPMGWLHWERFMCNLDCQEEPDSCISEKLFEEMAERMVTDGWKDAGYEYLCIDDCWMAPQRDSEGRLQADPQRFPHGIRQLANHVHSKGLKLGIYADVGNKTCAGFPGSFGYYDIDAQTFADWGVDLLKFDGCYCDSLENLADGYKHMSLALNKTGRPIVYSCEWPLYMWPFQKPNYTEIRQYCNHWRNFADIDDSWASIKSILDWTSRNQERIVDVAGPGGWNDPDMLVIGNFGLSWDQQVTQMALWAIMAGPLFMSNDLRAISPQAKRLLQDKDVIAINQDPLGKQGYQLRKGDNFEVWERPLSGDAWAVAIINRQEIGGPRGYTIPVASLGKGVACNPACFITQLLPVKRKLGFYEATSRLRSHINPTGTVLLQLENTMQTSLKDLL

SEQ ID NO: 721 - DNA, 1194 bp, Artificial Sequence
  variant of human alpha-galactosidase A
ctggataatggattggctagaacacctcctatggggtggcttcactgggagaggttcatgtgcaacctggactgtcaggaagaaccagacagctgcatctccgagaagctctttgaggaaatggccgaacgaatggtgactgacggctggaaagatgcaggttacgagtatctgtgtattgacgattgctggatggccccacaacgggattctgagggaagacttcaggctgatccgcagcgcttccctcatggcataaggcagctggcaaaccacgtccacagtaaggggctcaaattgggaatctacgcggacgtgggcaataagacctgtgccggttttccgggatcattcgggtattatgacattgacgcccaaacgtttgctgattggggcgttgacctgctgaaattcgatggttgctactgtgacagcctcgaaaacctggcagacggctacaagcatatgtctctcgccctgaataaaaccggtcggccaatcgtatattcctgcgagtggcctctttacatgtggccatttcagaaaccgaactacacagaaattcgccagtattgcaatcattggaggaacttcgctgatatcgatgactcatgggcctccataaagagcatcttggactggaccagtcggaatcaggagcgaattgtggatgtcgcaggccctggaggatggaacgatccagacatgctggtgatcggcaattttggcctctcttgggaccagcaggttacccaaatggctctgtgggcaattatggccggtcctcttttcatgagcaacgatctgcgcgcgatctcaccacaggcaaagagtctgctccaagacaaagatgtgatagccatcaatcaggacccgttgggaaagcagggctaccagctgagaaaaggcgacaactttgaggtctgggaaaggcctttgagtggagatgcgtgggctgtggccattattaatcggcaagagatcggaggtccacgcggttatacaattcctgtagcatctcttggcaagggcgttgcctgtaacccagcttgcttcatcactcagcttctgccggtgaagagaaaactgggtttctacgaagctaccagcaggctccgatcccacatcaaccctacaggaaccgtcctcttgcagctggagaatacgatgcagacttcactgaaggacctcctg

SEQ ID NO: 722 - protein, 398 aa, Artificial Sequence
  variant of human alpha-galactosidase A
LDNGLARTPPMGWLHWERFMCNLDCQEEPDSCISEKLFEEMAERMVTDGWKDAGYEYLCIDDCWMAPQRDSEGRLQADPQRFPHGIRQLANHVHSKGLKLGIYADVGNKTCAGFPGSFGYYDIDAQTFADWGVDLLKFDGCYCDSLENLADGYKHMSLALNKTGRPIVYSCEWPLYMWPFQKPNYTEIRQYCNHWRNFADIDDSWASIKSILDWTSRNQERIVDVAGPGGWNDPDMLVIGNFGLSWDQQVTQMALWAIMAGPLFMSNDLRAISPQAKSLLQDKDVIAINQDPLGKQGYQLRKGDNFEVWERPLSGDAWAVAIINRQEIGGPRGYTIPVASLGKGVACNPACFITQLLPVKRKLGFYEATSRLRSHINPTGTVLLQLENTMQTSLKDLL

SEQ ID NO: 723 - DNA, 1194 bp, Artificial Sequence
  variant of human alpha-galactosidase A
ctggataatggattggctagaacacctcctatggggtggcttcactgggagaggttcatgtgcaacctggactgtcaggaagaaccagacagctgcatctccgagaagctctttgaggaaatggccgaacgaatggtgactgacggctggaaagatgcaggttacgagtatctgtgtattgacgattgctggatggccccacaacgggattctgagggaagacttcaggctgatccgcagcgcttccctcatggcataaggcagctggcaaaccacgtccacagtaaggggctcaaattgggaatctacgcggacgtgggcaataagacctgtgccggttttccgggatcattcgggtattatgacattgacgcccaaacgtttgctgattggggcgttgacctgctgaaattcgatggttgctactgtgacagcctcgaaaacctggcagacggctacaagcatatgtctctcgccctgaataaaaccggtcggccaatcgtatattcctgcgagtggcctctttacatgtggccatttcagaaaccgaactacacagaaattcgccagtattgcaatcattggaggaacttcgctgatatcgatgactcatgggcctccataaagagcatcttggactggaccagtcggaatcaggagcgaattgtggatgtcgcaggccctggaggatggaacgatccagacatgctggtgatcggcaattttggcctctcttgggaccagcaggttacccaaatggctctgtgggcaattatggccggtcctcttttcatgagcaacgatctgcgcgcgatctcaccacaggcaaaggccctgctccaagacaaagatgtgatacgtatcaatcaggacccgttgggaaagcagggctaccagctgagaaaaggcgacaactttgaggtctgggaaaggcctttgagtggagatgcgtgggctgtggccattattaatcggcaagagatcggaggtccacgcggttatacaattcctgtagcatctcttggcaagggcgttgcctgtaacccagcttgcttcatcactcagcttctgccggtgaagagaaaactgggtttctacgaagctaccagcaggctccgatcccacatcaaccctacaggaaccgtcctcttgcagctggagaatacgatgcagacttcactgaaggacctcctg

SEQ ID NO: 724 - protein, 398 aa, Artificial Sequence
  variant of human alpha-galactosidase A
LDNGLARTPPMGWLHWERFMCNLDCQEEPDSCISEKLFEEMAERMVTDGWKDAGYEYLCIDDCWMAPQRDSEGRLQADPQRFPHGIRQLANHVHSKGLKLGIYADVGNKTCAGFPGSFGYYDIDAQTFADWGVDLLKFDGCYCDSLENLADGYKHMSLALNKTGRPIVYSCEWPLYMWPFQKPNYTEIRQYCNHWRNFADIDDSWASIKSILDWTSRNQERIVDVAGPGGWNDPDMLVIGNFGLSWDQQVTQMALWAIMAGPLFMSNDLRAISPQAKALLQDKDVIRINQDPLGKQGYQLRKGDNFEVWERPLSGDAWAVAIINRQEIGGPRGYTIPVASLGKGVACNPACFITQLLPVKRKLGFYEATSRLRSHINPTGTVLLQLENTMQTSLKDLL

SEQ ID NO: 725 - DNA, 1194 bp, Artificial Sequence
  variant of human alpha-galactosidase A
ctggataatggattggctagaacacctcctatggggtggcttcactgggagaggttcatgtgcaacctggactgtcaggaagaaccagacagctgcatctccgagaagctctttgaggaaatggccgaacgaatggtgactgacggctggaaagatgcaggttacgagtatctgtgtattgacgattgctggatggccccacaacgggattctgagggaagacttcaggctgatccgcagcgcttccctcatggcataaggcagctggcaaaccacgtccacagtaaggggctcaaattgggaatctacgcggacgtgggcaataagacctgtgccggttttccgggatcattcgggtattatgacattgacgcccaaacgtttgctgattggggcgttgacctgctgaaattcgatggttgctactgtgacagcctcgaaaacctggcagacggctacaagcatatgtctctcgccctgaataaaaccggtcggccaatcgtatattcctgcgagtggcctctttacatgtggccatttcagaaaccgaactacacagaaattcgccagtattgcaatcattggaggaacttcgctgatatcgatgactcatgggcctccataaagagcatcttggactggaccagtcggaatcaggagcgaattgtggatgtcgcaggccctggaggatggaacgatccagacatgctggtgatcggcaattttggcctctcttgggaccagcaggttacccaaatggctctgtgggcaattatggccggtcctcttttcatgagcaacgatctgcgcgcgatctcaccacaggcaaaggccctgctccaagacaaagatgtgatagccatcaatcaggacccgttgggaaagcagggctaccagctgagaaaaggcgacaactttgaggtctgggaaaggcctttgagtggagatgcgtgggctgtggccattattaatcggcaagagatcggaggtccacgcggttatacaattcctgtaggttctcttggcaagggcgttgcctgtaacccagcttgcttcatcactcagcttctgccggtgaagagaaaactgggtttctacgaagctaccagcaggctccgatcccacatcaaccctacaggaaccgtcctcttgcagctggagaatacgatgcagacttcactgaaggacctcctg

SEQ ID NO: 726 - protein, 398 aa, Artificial Sequence
  variant of human alpha-galactosidase A
LDNGLARTPPMGWLHWERFMCNLDCQEEPDSCISEKLFEEMAERMVTDGWKDAGYEYLCIDDCWMAPQRDSEGRLQADPQRFPHGIRQLANHVHSKGLKLGIYADVGNKTCAGFPGSFGYYDIDAQTFADWGVDLLKFDGCYCDSLENLADGYKHMSLALNKTGRPIVYSCEWPLYMWPFQKPNYTEIRQYCNHWRNFADIDDSWASIKSILDWTSRNQERIVDVAGPGGWNDPDMLVIGNFGLSWDQQVTQMALWAIMAGPLFMSNDLRAISPQAKALLQDKDVIAINQDPLGKQGYQLRKGDNFEVWERPLSGDAWAVAIINRQEIGGPRGYTIPVGSLGKGVACNPACFITQLLPVKRKLGFYEATSRLRSHINPTGTVLLQLENTMQTSLKDLL

SEQ ID NO: 727 - DNA, 1194 bp, Artificial Sequence
  variant of human alpha-galactosidase A
ctggataatggattggctagaacacctcctatggggtggcttcactgggagaggttcatgtgcaacctggactgtcaggaagaaccagacagctgcatctccgagaagctctttgaggaaatggccgaacgaatggtgactgacggctggaaagatgcaggttacgagtatctgtgtattgacgattgctggatggccccacaacgggattctgagggaagacttcaggctgatccgcagcgcttccctcatggcataaggcagctggcaaaccacgtccacagtaaggggctcaaattgggaatctacgcggacgtgggcaataagacctgtgccggttttccgggatcattcgggtattatgacattgacgcccaaacgtttgctgattggggcgttgacctgctgaaattcgatggttgctactgtgacagcctcgaaaacctggcagacggctacaagcatatgtctctcgccctgaataaaaccggtcggccaatcgtatattcctgcgagtggcctctttacatgtggccatttcagaaaccgaactacacagaaattcgccagtattgcaatcattggaggaacttcgctgatatcgatgactcatgggcctccataaagagcatcttggactggaccagtcggaatcaggagcgaattgtggatgtcgcaggccctggaggatggaacgatccagacatgctggtgatcggcaattttggcctctcttgggaccagcaggttacccaaatggctctgtgggcaattatggccggtcctcttttcatgagcaacgatctgcgcgcgatctcaccacaggcaaaggccctgctccaagacaaagatgtgatagccatcaatcaggacccgttgggaaagcagggctaccagctgagaaaaggcgacaactttgaggtctgggaaaggcctttgagtggagatgcgtgggctgtggccattattaatcggcaagagatcggaggtccacgcggttatacaattcctgtaaattctcttggcaagggcgttgcctgtaacccagcttgcttcatcactcagcttctgccggtgaagagaaaactgggtttctacgaagctaccagcaggctccgatcccacatcaaccctacaggaaccgtcctcttgcagctggagaatacgatgcagacttcactgaaggacctcctg

SEQ ID NO: 728 - protein, 398 aa, Artificial Sequence
  variant of human alpha-galactosidase A
LDNGLARTPPMGWLHWERFMCNLDCQEEPDSCISEKLFEEMAERMVTDGWKDAGYEYLCIDDCWMAPQRDSEGRLQADPQRFPHGIRQLANHVHSKGLKLGIYADVGNKTCAGFPGSFGYYDIDAQTFADWGVDLLKFDGCYCDSLENLADGYKHMSLALNKTGRPIVYSCEWPLYMWPFQKPNYTEIRQYCNHWRNFADIDDSWASIKSILDWTSRNQERIVDVAGPGGWNDPDMLVIGNFGLSWDQQVTQMALWAIMAGPLFMSNDLRAISPQAKALLQDKDVIAINQDPLGKQGYQLRKGDNFEVWERPLSGDAWAVAIINRQEIGGPRGYTIPVNSLGKGVACNPACFITQLLPVKRKLGFYEATSRLRSHINPTGTVLLQLENTMQTSLKDLL

SEQ ID NO: 729 - DNA, 1194 bp, Artificial Sequence
  variant of human alpha-galactosidase A
ctggataatggattggctagaacacctcctatggggtggcttcactgggagaggttcatgtgcaacctggactgtcaggaagaaccagacagctgcatctccgagaagctctttgaggaaatggccgaacgaatggtgactgacggctggaaagatgcaggttacgagtatctgtgtattgacgattgctggatggccccacaacgggattctgagggaagacttcaggctgatccgcagcgcttccctcatggcataaggcagctggcaaaccacgtccacagtaaggggctcaaattgggaatctacgcggacgtgggcaataagacctgtgccggttttccgggatcattcgggtattatgacattgacgcccaaacgtttgctgattggggcgttgacctgctgaaattcgatggttgctactgtgacagcctcgaaaacctggcagacggctacaagcatatgtctctcgccctgaataaaaccggtcggccaatcgtatattcctgcgagtggcctctttacatgtggccatttcagaaaccgaactacacagaaattcgccagtattgcaatcattggaggaacttcgctgatatcgatgactcatgggcctccataaagagcatcttggactggaccagtcggaatcaggagcgaattgtggatgtcgcaggccctggaggatggaacgatccagacatgctggtgatcggcaattttggcctctcttgggaccagcaggttacccaaatggctctgtgggcaattatggccggtcctcttttcatgagcaacgatctgcgcgcgatctcaccacaggcaaaggccctgctccaagacaaagatgtgatagccatcaatcaggacccgttgggaaagcagggctaccagctgagaaaaggcgacaactttgaggtctgggaaaggcctttgagtggagatgcgtgggctgtggccattattaatcggcaagagatcggaggtccacgcggttatacaattcctgtacagtctcttggcaagggcgttgcctgtaacccagcttgcttcatcactcagcttctgccggtgaagagaaaactgggtttctacgaagctaccagcaggctccgatcccacatcaaccctacaggaaccgtcctcttgcagctggagaatacgatgcagacttcactgaaggacctcctg

SEQ ID NO: 730 - protein, 398 aa, Artificial Sequence
  variant of human alpha-galactosidase A
LDNGLARTPPMGWLHWERFMCNLDCQEEPDSCISEKLFEEMAERMVTDGWKDAGYEYLCIDDCWMAPQRDSEGRLQADPQRFPHGIRQLANHVHSKGLKLGIYADVGNKTCAGFPGSFGYYDIDAQTFADWGVDLLKFDGCYCDSLENLADGYKHMSLALNKTGRPIVYSCEWPLYMWPFQKPNYTEIRQYCNHWRNFADIDDSWASIKSILDWTSRNQERIVDVAGPGGWNDPDMLVIGNFGLSWDQQVTQMALWAIMAGPLFMSNDLRAISPQAKALLQDKDVIAINQDPLGKQGYQLRKGDNFEVWERPLSGDAWAVAIINRQEIGGPRGYTIPVQSLGKGVACNPACFITQLLPVKRKLGFYEATSRLRSHINPTGTVLLQLENTMQTSLKDLL

SEQ ID NO: 731 - DNA, 1194 bp, Artificial Sequence
  variant of human alpha-galactosidase A
ctggataatggattggctagaacacctcctatggggtggcttcactgggagaggttcatgtgcaacctggactgtcaggaagaaccagacagctgcatctccgagaagctctttgaggaaatggccgaacgaatggtgactgacggctggaaagatgcaggttacgagtatctgtgtattgacgattgctggatggccccacaacgggattctgagggaagacttcaggctgatccgcagcgcttccctcatggcataaggcagctggcaaaccacgtccacagtaaggggctcaaattgggaatctacgcggacgtgggcaataagacctgtgccggttttccgggatcattcgggtattatgacattgacgcccaaacgtttgctgattggggcgttgacctgctgaaattcgatggttgctactgtgacagcctcgaaaacctggcagacggctacaagcatatgtctctcgccctgaataaaaccggtcggccaatcgtatattcctgcgagtggcctctttacatgtggccatttcagaaaccgaactacacagaaattcgccagtattgcaatcattggaggaacttcgctgatatcgatgactcatgggcctccataaagagcatcttggactggaccagtcggaatcaggagcgaattgtggatgtcgcaggccctggaggatggaacgatccagacatgctggtgatcggcaattttggcctctcttgggaccagcaggttacccaaatggctctgtgggcaattatggccggtcctcttttcatgagcaacgatctgcgcgcgatctcaccacaggcaaaggccctgctccaagacaaagatgtgatagccatcaatcaggacccgttgggaaagcagggctaccagctgagaaaaggcgacaactttgaggtctgggaaaggcctttgagtggagatgcgtgggctgtggccattattaatcggcaagagatcggaggtccacgcggttatacaattcctgtagtttctcttggcaagggcgttgcctgtaacccagcttgcttcatcactcagcttctgccggtgaagagaaaactgggtttctacgaagctaccagcaggctccgatcccacatcaaccctacaggaaccgtcctcttgcagctggagaatacgatgcagacttcactgaaggacctcctg

SEQ ID NO: 732 - protein, 398 aa, Artificial Sequence
  variant of human alpha-galactosidase A
LDNGLARTPPMGWLHWERFMCNLDCQEEPDSCISEKLFEEMAERMVTDGWKDAGYEYLCIDDCWMAPQRDSEGRLQADPQRFPHGIRQLANHVHSKGLKLGIYADVGNKTCAGFPGSFGYYDIDAQTFADWGVDLLKFDGCYCDSLENLADGYKHMSLALNKTGRPIVYSCEWPLYMWPFQKPNYTEIRQYCNHWRNFADIDDSWASIKSILDWTSRNQERIVDVAGPGGWNDPDMLVIGNFGLSWDQQVTQMALWAIMAGPLFMSNDLRAISPQAKALLQDKDVIAINQDPLGKQGYQLRKGDNFEVWERPLSGDAWAVAIINRQEIGGPRGYTIPVVSLGKGVACNPACFITQLLPVKRKLGFYEATSRLRSHINPTGTVLLQLENTMQTSLKDLL

SEQ ID NO: 733 - DNA, 1194 bp, Artificial Sequence
  variant of human alpha-galactosidase A
ctggataatggattggctagaacacctcctatggggtggcttcactgggagaggttcatgtgcaacctggattgtcaggaagaaccagacagctgcatctccgagaagctctttgaggaaatggccgaacgaatggtgactgacggctggaaagatgcaggttacgagtatctgtgcattgacgattgctggatggccccacaacgggattctgagggaagacttcaggctgatccgcagcgcttccctcatggcataaggcagctggcaaaccacgtccacagtaaggggctcaaattgggaatctacgcggacgtgggcaataagacctgtgccggttttccgggatcattcgggtattatgacattgacgcccaaacgtttgctgattggggcgttgacctgctgaaattcgatggttgctacagtgacagcctcgaaaacctggcagacggctacaagcatatgtctctcgccctgaataaaaccggtcggccaatcgtatattcctgcgagtggcctctttacatgtggccatttcagaaaccgaactacacagaaattcgccagtattgcaatcattggaggaacttcgctgatatcgatgactcatgggcctccataaagagcatcttggactggaccagtcggaatcaggagcgaattgtggatgtcgcaggccctggaggatggaacgatccagacatgctggtgatcggcaattttggcctctcttgggaccagcaggttacccaaatggctctgtgggcaattatggccggtcctcttttcatgagcaacgatctgcgcgcaatctcaccacaggcaaaggccctgctccaagacaaagatgtgatagccatcaatcaggacccgttgggaaagcagggctaccagctgagaaaaggcgacaactttgaggtctgggaaaggcctttgagtggagatgcgtgggctgtggccattattaatcggcaagagatcggaggtccacgcggttatacaattcctgtagcatctcttggcaagggcgttgcctgtaacccagcttgcttcatcactcagcttctgccggtgaagagaaaactgggtttctacgaagctaccagcaggctccgatcccacatcaaccctacaggaaccgtcctcttgcagctggagaatacgatgcagacttcactgaaggacctcctg

SEQ ID NO: 734 - protein, 398 aa, Artificial Sequence
  variant of human alpha-galactosidase A
LDNGLARTPPMGWLHWERFMCNLDCQEEPDSCISEKLFEEMAERMVTDGWKDAGYEYLCIDDCWMAPQRDSEGRLQADPQRFPHGIRQLANHVHSKGLKLGIYADVGNKTCAGFPGSFGYYDIDAQTFADWGVDLLKFDGCYSDSLENLADGYKHMSLALNKTGRPIVYSCEWPLYMWPFQKPNYTEIRQYCNHWRNFADIDDSWASIKSILDWTSRNQERIVDVAGPGGWNDPDMLVIGNFGLSWDQQVTQMALWAIMAGPLFMSNDLRAISPQAKALLQDKDVIAINQDPLGKQGYQLRKGDNFEVWERPLSGDAWAVAIINRQEIGGPRGYTIPVASLGKGVACNPACFITQLLPVKRKLGFYEATSRLRSHINPTGTVLLQLENTMQTSLKDLL

SEQ ID NO: 735 - DNA, 1194 bp, Artificial Sequence
  variant of human alpha-galactosidase A
ctggataatggattggctagaacacctcctatggggtggcttcactgggagaggttcatgtgcaacctggattgtcaggaagaaccagacagctgcatctccgagaagctctttgaggaaatggccgaacgaatggtgactgacggctggaaagatgcaggttacgagtatctgtgtattgacgattgctggatggccccacaacgggattctgagggaagacttcaggctgatccgcagcgcttccctcatggcataaggcagctggcaaaccacgtccacagtaaggggctcaaattgggaatctacgcggacgtgggcaataagacctgtgccggttttccgggatcattcgggtattatgacattgacgcccaaacgtttgctgattggggcgttgacctgctgaaattcgatggttgctacagtgacagcctcgaaaacctggcagacggctacaagcatatgtctctcgccctgaataaaaccggtcggccaatcgtatattcctgcgagtggcctctttacatgtggccatttcagaaaccgaactacacagaaattcgccagtattgcaatcattggaggaacttcgctgatatcgatgactcatgggcctccataaagagcatcttggactggaccagtcggaatcaggagcgaattgtggatgtcgcaggccctggaggatggaacgatccagacatgctggtgatcggcaattttggcctctcttgggaccagcaggttacccaaatggctctgtgggcaattatggccggtcctcttttcatgagcaacgatctgcgcaacatctcaccacaggcaaaggccctgctccaagacaaagatgtgatagccatcaatcaggacccgttgggaaagcagggctaccagctgagaaaaggcgacaactttgaggtctgggaaaggcctttgagtggagatgcgtgggctgtggccattattaatcggcaagagatcggaggtccacgcgggtatacaattcctgtagcatctcttggcaagggcgttgcctgtaacccagcttgcttcatcactcagcttctgccggtgaagagaaaactgggtttctacgaagctaccagcaggctccgatcccacatcaaccctacaggaaccgtcctcttgcagctggaaaatacgatgcaaacttcactgaaggacctcctg

SEQ ID NO: 736 - protein, 398 aa, Artificial Sequence
  variant of human alpha-galactosidase A
LDNGLARTPPMGWLHWERFMCNLDCQEEPDSCISEKLFEEMAERMVTDGWKDAGYEYLCIDDCWMAPQRDSEGRLQADPQRFPHGIRQLANHVHSKGLKLGIYADVGNKTCAGFPGSFGYYDIDAQTFADWGVDLLKFDGCYSDSLENLADGYKHMSLALNKTGRPIVYSCEWPLYMWPFQKPNYTEIRQYCNHWRNFADIDDSWASIKSILDWTSRNQERIVDVAGPGGWNDPDMLVIGNFGLSWDQQVTQMALWAIMAGPLFMSNDLRNISPQAKALLQDKDVIAINQDPLGKQGYQLRKGDNFEVWERPLSGDAWAVAIINRQEIGGPRGYTIPVASLGKGVACNPACFITQLLPVKRKLGFYEATSRLRSHINPTGTVLLQLENTMQTSLKDLL

SEQ ID NO: 737 - DNA, 1194 bp, Artificial Sequence
  variant of human alpha-galactosidase A
ctggataatggattggctagaacacctcctatggggtggcttcactgggagaggttcatgtgcaacctggattgtcaggaagaaccagacagctgcatctccgagaagctctttgaggaaatggccgaacgaatggtgactgacggctggaaagatgcaggttacgagtatctgtgtattgacgattgctggatggccccacaacgggattctgagggaagacttcaggctgatccgcagcgcttccctcatggcataaggcagctggcaaaccacgtccacagtaaggggctcaaattgggaatctacgcggacgtgggcaataagacctgtgccggttttccgggatcattcgggtattatgacattgacgcccaaacgtttgctgattggggcgttgacctgctgaaattcgatggttgctacagtgacagcctcgaaaacctggcagacggctacaagcatatgtctctcgccctgaataaaaccggtcggccaatcgtatattcctgcgagtggcctctttacatgtggccatttcagaaaccgaactacacagaaattcgccagtattgcaatcattggaggaacttcgctgatatcgatgactcatgggcctccataaagagcatcttggactggaccagtcggaatcaggagcgaattgtggatgtcgcaggccctggaggatggaacgatccagacatgctggtgatcggcaattttggcctctcttgggaccagcaggttacccaaatggctctgtgggcaattatggccggtcctcttttcatgagcaacgatctgcgcaacatctcaccacaggcaaaggccctgctccaagacaaagatgtgatagccatcaatcaggacccgttgggaaagcagggctaccagctgagaaaaggcgacaactttgaggtctgggaaaggcctttgagtggagatgcgtgggctgtggccattattaatcggcaagagatcggaggtccacgcgggtatacaattcctgtagcatctcttggcaagggcgttgcctgtaacccagcttgcaatatcactcagcttctgccggtgaagagaaaactgggtttctacgaagctaccagcaggctccgatcccacatcaaccctacaggaaccgtcctcttgcagctggaaaatacgaatcaaacttcactgaaggacctcctg

SEQ ID NO: 738 - protein, 398 aa, Artificial Sequence
  variant of human alpha-galactosidase A
LDNGLARTPPMGWLHWERFMCNLDCQEEPDSCISEKLFEEMAERMVTDGWKDAGYEYLCIDDCWMAPQRDSEGRLQADPQRFPHGIRQLANHVHSKGLKLGIYADVGNKTCAGFPGSFGYYDIDAQTFADWGVDLLKFDGCYSDSLENLADGYKHMSLALNKTGRPIVYSCEWPLYMWPFQKPNYTEIRQYCNHWRNFADIDDSWASIKSILDWTSRNQERIVDVAGPGGWNDPDMLVIGNFGLSWDQQVTQMALWAIMAGPLFMSNDLRNISPQAKALLQDKDVIAINQDPLGKQGYQLRKGDNFEVWERPLSGDAWAVAIINRQEIGGPRGYTIPVASLGKGVACNPACNITQLLPVKRKLGFYEATSRLRSHINPTGTVLLQLENTNQTSLKDLL

SEQ ID NO: 739 - DNA, 1194 bp, Artificial Sequence
  variant of human alpha-galactosidase A
ctggataatggattggctagaacacctcctatggggtggcttcactgggagaggttcatgtgcaacctggattgtcaggaagaaccagacagctgcatctccgagaagctctttgaggaaatggccgaacgaatggtgactgacggctggaaagatgcaggttacgagtatctgtgtattgacgattgctggatggccccacaacgggattctgagggaagacttcaggctgatccgcagcgcttccctcatggcataaggcagctggcaaaccacgtccacagtaaggggctcaaattgggaatctacgcggacgtgggcaataagacctgtgccggttttccgggatcattcgggtattatgacattgacgcccaaacgtttgctgattggggcgttgacctgctgaaattcgatggttgctacagtgacagcctcgaaaacctggcagacggctacaagcatatgtctctcgccctgaataaaaccggtcggccaatcgtatattcctgcgagtggcctctttacatgtggccatttcagaaaccgaactacacagaaattcgccagtattgcaatcattggaggaacttcgctgatatcaatgactcatgggcctccataaagagcatcttggactggaccagtcggaatcaggagcgaattgtggatgtcgcaggccctggaggatggaacgatccagacatgctggtgatcggcaattttggcctctcttgggaccagcaggttacccaaatggctctgtgggcaattatggccggtcctcttttcatgagcaacgatctgcgcgcaatctcaccacaggcaaaggccctgctccaagacaaagatgtgatagccatcaatcaggacccgttgggaaagcagggctaccagctgagaaaaggcgacaactttgaggtctgggaaaggcctttgagtggagatgcgtgggctgtggccattattaatcggcaagagatcggaggtccacgcggttatacaattcctgtagcatctcttggcaagggcgttgcctgtaacccagcttgcttcatcactcagcttctgccggtgaagagaaaactgggtttctacgaagctaccagcaggctccgatcccacatcaaccctacaggaaccgtcctcttgcagctggagaatacgatgcagacttcactgaaggacctcctg

SEQ ID NO: 740 - protein, 398 aa, Artificial Sequence
  variant of human alpha-galactosidase A
LDNGLARTPPMGWLHWERFMCNLDCQEEPDSCISEKLFEEMAERMVTDGWKDAGYEYLCIDDCWMAPQRDSEGRLQADPQRFPHGIRQLANHVHSKGLKLGIYADVGNKTCAGFPGSFGYYDIDAQTFADWGVDLLKFDGCYSDSLENLADGYKHMSLALNKTGRPIVYSCEWPLYMWPFQKPNYTEIRQYCNHWRNFADINDSWASIKSILDWTSRNQERIVDVAGPGGWNDPDMLVIGNFGLSWDQQVTQMALWAIMAGPLFMSNDLRAISPQAKALLQDKDVIAINQDPLGKQGYQLRKGDNFEVWERPLSGDAWAVAIINRQEIGGPRGYTIPVASLGKGVACNPACFITQLLPVKRKLGFYEATSRLRSHINPTGTVLLQLENTMQTSLKDLL

SEQ ID NO: 741 - DNA, 1194 bp, Artificial Sequence
  variant of human alpha-galactosidase A
ctggataatggattggctagaacacctcctatggggtggcttcactgggagaggttcatgtgcaacctggattgtcaggaagaaccagacagctgcatctccgagaagctctttgaggaaatggccgaacgaatggtgactgacggctggaaagatgcaggttacgagtatctgtgtattgacgattgctggatggccccacaacgggattctgagggaagacttcaggctgatccgcagcgcttccctcatggcataaggcagctggcaaaccacgtccacagtaaggggctcaaattgggaatctacgcggacgtgggcaataagacctgtgccggttttccgggatcattcgggtattatgacattgacgcccaaacgtttgctgattggggcgttgacctgctgaaattcgatggttgctacagtgacagcctcgaaaacctggcagacggctacaagcatatgtctctcgccctgaataaaaccggtcggccaatcgtatattcctgcgagtggcctctttacatgtggccatttcagaaaccgaactacacagaaattcgccagtattgcaatcattggaggaacttcgctgatatcgatgactcatgggcctccataaagagcatcttggactggaccagtcggaatcaggagcgaattgtggatgtcgcaggccctggaggatggaacgatccagacatgctggtgatcggcaattttggcctctcttgggaccagcaggttacccaaatggctctgtgggcaattatggccggtcctcttttcatgagcaacgatctgcgcgcaatctcaccacaggcaaaggccctgctccaagacaaagatgtgatagccatcaatcaggacccgttgggaaagcagggctaccagctgagaaaaggcgacaactttgaggtctgggaaaggcctttgagtggagatgcgtgggctgtggccattattaatcggcaagagatcggaggtccacgcgggtatacaattcctgtagcatctcttggcaagggcgttgcctgtaacccagcttgctttatcactcagcttctgccggtgaagagaaaactgggtttctacgaagctaccagcaggctccgatcccacatcaaccctacaggaaccgtcctcttgcagctgaataatacgatgaacacttcactgaaggacctcctg

SEQ ID NO: 742 - protein, 398 aa, Artificial Sequence
  variant of human alpha-galactosidase A
LDNGLARTPPMGWLHWERFMCNLDCQEEPDSCISEKLFEEMAERMVTDGWKDAGYEYLCIDDCWMAPQRDSEGRLQADPQRFPHGIRQLANHVHSKGLKLGIYADVGNKTCAGFPGSFGYYDIDAQTFADWGVDLLKFDGCYSDSLENLADGYKHMSLALNKTGRPIVYSCEWPLYMWPFQKPNYTEIRQYCNHWRNFADIDDSWASIKSILDWTSRNQERIVDVAGPGGWNDPDMLVIGNFGLSWDQQVTQMALWAIMAGPLFMSNDLRAISPQAKALLQDKDVIAINQDPLGKQGYQLRKGDNFEVWERPLSGDAWAVAIINRQEIGGPRGYTIPVASLGKGVACNPACFITQLLPVKRKLGFYEATSRLRSHINPTGTVLLQLNNTMNTSLKDLL

SEQ ID NO: 743 - DNA, 1194 bp, Artificial Sequence
  variant of human alpha-galactosidase A
ctggataatggattggctagaacacctcctatggggtggcttcactgggagaggttcatgtgcaacctggattgtcaggaagaaccagacagctgcatctccgagaagctctttgaggaaatggccgaacgaatggtgactgacggctggaaagatgcaggttacgagtatctgtgtattgacgattgctggatggccccacaacgggattctgagggaagacttcaggctgatccgcagcgcttccctcatggcataaggcagctggcaaaccacgtccacagtaaggggctcaaattgggaatctacgcggacgtgggcaataagacctgtgccggttttccgggatcattcgggtattatgacattgacgcccaaacgtttgctgattggggcgttgacctgctgaaattcgatggttgctacagtgacagcctcgaaaacctggcagacggctacaagcatatgtctctcgccctgaataaaaccggtcggccaatcgtatattcctgcgagtggcctctttacatgtggccatttcagaaaccgaactacacagaaattcgccagtattgcaatcattggaggaacttcgctgatatcgatgactcatgggcctccataaagagcatcttggactggaccagtcggaatcaggagcgaattgtggatgtcgcaggccctggaggatggaacgatccagacatgctggtgatcggcaattttggcctctcttgggaccagcaggttacccaaatggctctgtgggcaattatggccggtcctcttttcatgagcaacgatctgcgcgcgatctcaccacaggcaaaggccctgctccaagacaaagatgtgatagccatcaatcaggacccgttgggaaagcagggctaccagctgagaaaaggcgacaactttgaggtctgggaaaggcctttgagtggagatgcgtgggctgtggccattattaatcggcaagagatcggaggtccacgcaattatacaattcctgtagcatctcttggcaagggcgttgcctgtaacccagcttgcttcatcactcagcttctgccggtgaagagaaaactgggtttctacgaagctaccagcaggctccgatcccacatcaaccctacaggaaccgtcctcttgcagctggagaatacgatgcagacttcactgaaggacctcctg

SEQ ID NO: 744 - protein, 398 aa, Artificial Sequence
  variant of human alpha-galactosidase A
LDNGLARTPPMGWLHWERFMCNLDCQEEPDSCISEKLFEEMAERMVTDGWKDAGYEYLCIDDCWMAPQRDSEGRLQADPQRFPHGIRQLANHVHSKGLKLGIYADVGNKTCAGFPGSFGYYDIDAQTFADWGVDLLKFDGCYSDSLENLADGYKHMSLALNKTGRPIVYSCEWPLYMWPFQKPNYTEIRQYCNHWRNFADIDDSWASIKSILDWTSRNQERIVDVAGPGGWNDPDMLVIGNFGLSWDQQVTQMALWAIMAGPLFMSNDLRAISPQAKALLQDKDVIAINQDPLGKQGYQLRKGDNFEVWERPLSGDAWAVAIINRQEIGGPRNYTIPVASLGKGVACNPACFITQLLPVKRKLGFYEATSRLRSHINPTGTVLLQLENTMQTSLKDLL

SEQ ID NO: 745 - DNA, 1194 bp, Artificial Sequence
  variant of human alpha-galactosidase A
ctggataatggattggctagaacacctcctatggggtggcttcactgggagaggttcatgtgcaacctggattgtcaggaagaaccagacagctgcatctccgagaagctctttgaggaaatggccgaacgaatggtgactgacggctggaaagatgcaggttacgagtatctgtgcattgacgattgctggatggccccacaacgggattctgagggaagacttcaggctgatccgcagcgcttccctcatggcataaggcagctggcaaaccacgtccacagtaaggggctcaaattgggaatctacgcggacgtgggcaataagacctgtgccggttttccgggatcattcgggtattatgacattgacgcccaaacgtttgctgattggggcgttgacctgctgaaattcgatggttgctacagtgacagcctcgaaaacctggcagacggctacaagcatatgtctctcgccctgaataaaaccggtcggccaatcgtatattcctgcgagtggcctctttacatgtggccatttcagaaaccgaactacacagaaattcgccagtattgcaatcattggaggaacttcgctgatatcgatgactcatgggcctccataaagagcatcttggactggaccagtcggaatcaggagcgaattgtggatgtcgcaggccctggaggatggaacgatccagacatgctggtgatcggcaattttggcctctcttgggaccagcaggttacccaaatggctctgtgggcaattatggccggtcctcttttcatgagcaacgatctgcgcgcaatctcaccacaggcaaaggccctgctccaagacaaagatgtgatagccatcaatcaggacccgttgggaaagcagggctaccagctgagaaaaggcgacaactttgaggtctgggaaaggcctttgagtggagatgcgtgggctgtggccattattaatcggcaagagatcggaggtccacgcaattatacaattcctgtagcatctcttggcaagggcgttgcctgtaacccagcttgctttatcactcagcttctgccggtgaagagaaaactgggtttctacgaagctaccagcaggctccgatcccacatcaaccctacaggaaccgtcctcttgcagctgaataatacgactcaaacttcactgaaggacctcctg

SEQ ID NO: 746 - protein, 398 aa, Artificial Sequence
  variant of human alpha-galactosidase A
LDNGLARTPPMGWLHWERFMCNLDCQEEPDSCISEKLFEEMAERMVTDGWKDAGYEYLCIDDCWMAPQRDSEGRLQADPQRFPHGIRQLANHVHSKGLKLGIYADVGNKTCAGFPGSFGYYDIDAQTFADWGVDLLKFDGCYSDSLENLADGYKHMSLALNKTGRPIVYSCEWPLYMWPFQKPNYTEIRQYCNHWRNFADIDDSWASIKSILDWTSRNQERIVDVAGPGGWNDPDMLVIGNFGLSWDQQVTQMALWAIMAGPLFMSNDLRAISPQAKALLQDKDVIAINQDPLGKQGYQLRKGDNFEVWERPLSGDAWAVAIINRQEIGGPRNYTIPVASLGKGVACNPACFITQLLPVKRKLGFYEATSRLRSHINPTGTVLLQLNNTTQTSLKDLL

SEQ ID NO: 747 - DNA, 1194 bp, Artificial Sequence
  variant of human alpha-galactosidase A
ctggataatggattggctagaacacctcctatggggtggcttcactgggagaggttcatgtgcaacctggattgtcaggaagaaccagacagctgcatctccgagaagctctttgaggaaatggccgaacgaatggtgactgacggctggaaagatgcaggttacgagtatctggctattgacgattgctggatggccccacaacgggattctgagggaagacttcaggctgatccgcagcgcttccctcatggcataaggcagctggcaaaccacgtccacagtaaggggctcaaattgggaatctacgcggacgtgggcaataagacctgtgccggttttccgggatcattcgggtattatgacattgacgcccaaacgtttgctgattggggcgttgacctgctgaaattcgatggttgctactgtgacagcctcgaaaacctggcagacggctacaagcatatgtctctcgccctgaataaaaccggtcggccaatcgtatattcctgcgagtggcctctttacatgtggccatttcagaaaccgaactacacagaaattcgccagtattgcaatcattggaggaacttcgctgatatcgatgactcatgggcctccataaagagcatcttggactggaccagtcggaatcaggagcgaattgtggatgtcgcaggccctggaggatggaacgatccagacatgctggtgatcggcaattttggcctctcttgggaccagcaggttacccaaatggctctgtgggcaattatggccggtcctcttttcatgagcaacgatctgcgcgcaatctcaccacaggcaaaggccctgctccaagacaaagatgtgatagccatcaatcaggacccgttgggaaagcagggctaccagctgagaaaaggcgacaactttgaggtctgggaaaggcctttgagtggagatgcgtgggctgtggccattattaatcggcaagagatcggaggtccacgcgggtatacaattcctgtagcatctcttggcaagggcgttgcctgtaacccagcttgcttcatcactcagcttctgccggtgaagagaaaactgggtttctacgaagctaccagcaggctccgatcccacatcaaccctacaggaaccgtcctcttgcagctggagaatacgatgcagacttcactgaaggacctcctg

SEQ ID NO: 748 - protein, 398 aa, Artificial Sequence
  variant of human alpha-galactosidase A
LDNGLARTPPMGWLHWERFMCNLDCQEEPDSCISEKLFEEMAERMVTDGWKDAGYEYLAIDDCWMAPQRDSEGRLQADPQRFPHGIRQLANHVHSKGLKLGIYADVGNKTCAGFPGSFGYYDIDAQTFADWGVDLLKFDGCYCDSLENLADGYKHMSLALNKTGRPIVYSCEWPLYMWPFQKPNYTEIRQYCNHWRNFADIDDSWASIKSILDWTSRNQERIVDVAGPGGWNDPDMLVIGNFGLSWDQQVTQMALWAIMAGPLFMSNDLRAISPQAKALLQDKDVIAINQDPLGKQGYQLRKGDNFEVWERPLSGDAWAVAIINRQEIGGPRGYTIPVASLGKGVACNPACFITQLLPVKRKLGFYEATSRLRSHINPTGTVLLQLENTMQTSLKDLL

SEQ ID NO: 749 - DNA, 1194 bp, Artificial Sequence
  variant of human alpha-galactosidase A
ctggataatggattggctagaacacctcctatggggtggcttcactgggagaggttcatgtgcaacctggattgtcaggaagaaccagacagctgcatctccgagaagctctttgaggaaatggccgaacgaatggtgactgacggctggaaagatgcaggttacgagtatctggctattgacgattgctggatggccccacaacgggattctgagggaagacttcaggctgatccgcagcgcttccctcatggcataaggcagctggcaaaccacgtccacagtaaggggctcaaattgggaatctacgcggacgtgggcaataagacctgtgccggttttccgggatcattcgggtattatgacattgacgcccaaacgtttgctgattggggcgttgacctgctgaaattcgatggttgctacagtgacagcctcgaaaacctggcagacggctacaagcatatgtctctcgccctgaataaaaccggtcggccaatcgtatattcctgcgagtggcctctttacatgtggccatttcagaaaccgaactacacagaaattcgccagtattgcaatcattggaggaacttcgctgatatcgatgactcatgggcctccataaagagcatcttggactggaccagtcggaatcaggagcgaattgtggatgtcgcaggccctggaggatggaacgatccagacatgctggtgatcggcaattttggcctctcttgggaccagcaggttacccaaatggctctgtgggcaattatggccggtcctcttttcatgagcaacgatctgcgcgcaatctcaccacaggcaaaggccctgctccaagacaaagatgtgatagccatcaatcaggacccgttgggaaagcagggctaccagctgagaaaaggcgacaactttgaggtctgggaaaggcctttgagtggagatgcgtgggctgtggccattattaatcggcaagagatcggaggtccacgcgggtatacaattcctgtagcatctcttggcaagggcgttgcctgtaacccagcttgcttcatcactcagcttctgccggtgaagagaaaactgggtttctacgaagctaccagcaggctccgatcccacatcaaccctacaggaaccgtcctcttgcagctggagaatacgatgcagacttcactgaaggacctcctg

SEQ ID NO: 750 - protein, 398 aa, Artificial Sequence
  variant of human alpha-galactosidase A
LDNGLARTPPMGWLHWERFMCNLDCQEEPDSCISEKLFEEMAERMVTDGWKDAGYEYLAIDDCWMAPQRDSEGRLQADPQRFPHGIRQLANHVHSKGLKLGIYADVGNKTCAGFPGSFGYYDIDAQTFADWGVDLLKFDGCYSDSLENLADGYKHMSLALNKTGRPIVYSCEWPLYMWPFQKPNYTEIRQYCNHWRNFADIDDSWASIKSILDWTSRNQERIVDVAGPGGWNDPDMLVIGNFGLSWDQQVTQMALWAIMAGPLFMSNDLRAISPQAKALLQDKDVIAINQDPLGKQGYQLRKGDNFEVWERPLSGDAWAVAIINRQEIGGPRGYTIPVASLGKGVACNPACFITQLLPVKRKLGFYEATSRLRSHINPTGTVLLQLENTMQTSLKDLL

SEQ ID NO: 751 - DNA, 1194 bp, Artificial Sequence
  variant of human alpha-galactosidase A
ctggataatggattggctagaacacctcctatggggtggcttcactgggagaggttcatgtgcaacctggattgtcaggaagaaccagacagctgcatctccgagaagctctttgaggaaatggccgaacgaatggtgactgacggctggaaagatgcaggttacgagtatctggctattgacgattgctggatggccccacaacgggattctgagggaagacttcaggctgatccgcagcgcttccctcatggcataaggcagctggcaaaccacgtccacagtaaggggctcaaattgggaatctacgcggacgtgggcaataagacctgtgccggttttccgggatcattcgggtattatgacattgacgcccaaacgtttgctgattggggcgttgacctgctgaaattcgatggttgctacagtgacagcctcgaaaacctggcagacggctacaagcatatgtctctcgccctgaataaaaccggtcggccaatcgtatattcctgcgagtggcctctttacatgtggccatttcagaaaccgaactacacagaaattcgccagtattgcaatcattggaggaacttcgctgatatcgatgactcatgggcctccataaagagcatcttggactggaccagtcggaatcaggagcgaattgtggatgtcgcaggccctggaggatggaacgatccagacatgctggtgatcggcaattttggcctctcttgggaccagcaggttacccaaatggctctgtgggcaattatggccggtcctcttttcatgagcaacgatctgcgcaacatctcaccacaggcaaaggccctgctccaagacaaagatgtgatagccatcaatcaggacccgttgggaaagcagggctaccagctgagaaaaggcgacaactttgaggtctgggaaaggcctttgagtggagatgcgtgggctgtggccattattaatcggcaagagatcggaggtccacgcgggtatacaattcctgtagcatctcttggcaagggcgttgcctgtaacccagcttgctttatcactcagcttctgccggtgaagagaaaactgggtttctacgaagctaccagcaggctccgatcccacatcaaccctacaggaaccgtcctcttgcagctggagaatacgatgcagacttcactgaaggacctcctg

SEQ ID NO: 752 - protein, 398 aa, Artificial Sequence
  variant of human alpha-galactosidase A
LDNGLARTPPMGWLHWERFMCNLDCQEEPDSCISEKLFEEMAERMVTDGWKDAGYEYLAIDDCWMAPQRDSEGRLQADPQRFPHGIRQLANHVHSKGLKLGIYADVGNKTCAGFPGSFGYYDIDAQTFADWGVDLLKFDGCYSDSLENLADGYKHMSLALNKTGRPIVYSCEWPLYMWPFQKPNYTEIRQYCNHWRNFADIDDSWASIKSILDWTSRNQERIVDVAGPGGWNDPDMLVIGNFGLSWDQQVTQMALWAIMAGPLFMSNDLRNISPQAKALLQDKDVIAINQDPLGKQGYQLRKGDNFEVWERPLSGDAWAVAIINRQEIGGPRGYTIPVASLGKGVACNPACFITQLLPVKRKLGFYEATSRLRSHINPTGTVLLQLENTMQTSLKDLL

SEQ ID NO: 753 - DNA, 1194 bp, Artificial Sequence
  variant of human alpha-galactosidase A
ctggataatggattggctagaacacctcctatggggtggcttcactgggagaggttcatgtgcaacctggactgtcaggaagaaccagacagctgcatctccgagaagctctttgaggaaatggccgaacgaatggtgactgacggctggaaagatgcaggttacgagtatctggctattgacgattgctggatggccccacaacgggattctgagggaagacttcaggctgatccgcagcgcttccctcatggcataaggcagctggcaaaccacgtccacagtaaggggctcaaattgggaatctacgcggacgtgggcaataagacctgtgccggttttccgggatcattcgggtattatgacattgacgcccaaacgtttgctgattggggcgttgacctgctgaaattcgatggttgctactgtgacagcctcgaaaacctggcagacggctacaagcatatgtctctcgccctgaataaaaccggtcggccaatcgtatattcctgcgagtggcctctttacatgtggccatttcagaaaccgaactacacagaaattcgccagtattgcaatcattggaggaacttcgctgatatcaatgactcatgggcctccataaagagcatcttggactggaccagtcggaatcaggagcgaattgtggatgtcgcaggccctggaggatggaacgatccagacatgctggtgatcggcaattttggcctctcttgggaccagcaggttacccaaatggctctgtgggcaattatggccggtcctcttttcatgagcaacgatctgcgcgcaatctcaccacaggcaaaggccctgctccaagacaaagatgtgatagccatcaatcaggacccgttgggaaagcagggctaccagctgagaaaaggcgacaactttgaggtctgggaaaggcctttgagtggagatgcgtgggctgtggccattattaatcggcaagagatcggaggtccacgcgggtatacaattcctgtagcatctcttggcaagggcgttgcctgtaacccagcttgcttcatcactcagcttctgccggtgaagagaaaactgggtttctacgaagctaccagcaggctccgatcccacatcaaccctacaggaaccgtcctcttgcagctggagaatacgatgcagacttcactgaaggacctcctg

SEQ ID NO: 754 - protein, 398 aa, Artificial Sequence
  variant of human alpha-galactosidase A
LDNGLARTPPMGWLHWERFMCNLDCQEEPDSCISEKLFEEMAERMVTDGWKDAGYEYLAIDDCWMAPQRDSEGRLQADPQRFPHGIRQLANHVHSKGLKLGIYADVGNKTCAGFPGSFGYYDIDAQTFADWGVDLLKFDGCYCDSLENLADGYKHMSLALNKTGRPIVYSCEWPLYMWPFQKPNYTEIRQYCNHWRNFADINDSWASIKSILDWTSRNQERIVDVAGPGGWNDPDMLVIGNFGLSWDQQVTQMALWAIMAGPLFMSNDLRAISPQAKALLQDKDVIAINQDPLGKQGYQLRKGDNFEVWERPLSGDAWAVAIINRQEIGGPRGYTIPVASLGKGVACNPACFITQLLPVKRKLGFYEATSRLRSHINPTGTVLLQLENTMQTSLKDLL

SEQ ID NO: 755 - DNA, 1194 bp, Artificial Sequence
  variant of human alpha-galactosidase A
ctggataatggattggctagaacacctcctatggggtggcttcactgggagaggttcatgtgcaacctggattgtcaggaagaaccagacagctgcatctccgagaagctctttgaggaaatggccgaacgaatggtgactgacggctggaaagatgcaggttacgagtatctgactattgacgattgctggatggccccacaacgggattctgagggaagacttcaggctgatccgcagcgcttccctcatggcataaggcagctggcaaaccacgtccacagtaaggggctcaaattgggaatctacgcggacgtgggcaataagacctgtgccggttttccgggatcattcgggtattatgacattgacgcccaaacgtttgctgattggggcgttgacctgctgaaattcgatggttgctactgtgacagcctcgaaaacctggcagacggctacaagcatatgtctctcgccctgaataaaaccggtcggccaatcgtatattcctgcgagtggcctctttacatgtggccatttcagaaaccgaactacacagaaattcgccagtattgcaatcattggaggaacttcgctgatatcgatgactcatgggcctccataaagagcatcttggactggaccagtcggaatcaggagcgaattgtggatgtcgcaggccctggaggatggaacgatccagacatgctggtgatcggcaattttggcctctcttgggaccagcaggttacccaaatggctctgtgggcaattatggccggtcctcttttcatgagcaacgatctgcgcgcgatctcaccacaggcaaaggccctgctccaagacaaagatgtgatagccatcaatcaggacccgttgggaaagcagggctaccagctgagaaaaggcgacaactttgaggtctgggaaaggcctttgagtggagatgcgtgggctgtggccattattaatcggcaagagatcggaggtccacgcggttatacaattcctgtagcatctcttggcaagggcgttgcctgtaacccagcttgctttatcactcagcttctgccggtgaagagaaaactgggtttctacgaagctaccagcaggctccgatcccacatcaaccctacaggaaccgtcctcttgcagctggagaatacgatgcagacttcactgaaggacctcctg

SEQ ID NO: 756 - protein, 398 aa, Artificial Sequence
  variant of human alpha-galactosidase A
LDNGLARTPPMGWLHWERFMCNLDCQEEPDSCISEKLFEEMAERMVTDGWKDAGYEYLTIDDCWMAPQRDSEGRLQADPQRFPHGIRQLANHVHSKGLKLGIYADVGNKTCAGFPGSFGYYDIDAQTFADWGVDLLKFDGCYCDSLENLADGYKHMSLALNKTGRPIVYSCEWPLYMWPFQKPNYTEIRQYCNHWRNFADIDDSWASIKSILDWTSRNQERIVDVAGPGGWNDPDMLVIGNFGLSWDQQVTQMALWAIMAGPLFMSNDLRAISPQAKALLQDKDVIAINQDPLGKQGYQLRKGDNFEVWERPLSGDAWAVAIINRQEIGGPRGYTIPVASLGKGVACNPACFITQLLPVKRKLGFYEATSRLRSHINPTGTVLLQLENTMQTSLKDLL

SEQ ID NO: 757 - DNA, 1194 bp, Artificial Sequence
  variant of human alpha-galactosidase A
ctggataatggattggctagaacacctcctatggggtggcttcactgggagaggttcatgtgcaacctggactgtcaggaagaaccagacagctgcatctccgagaagctctttgaggaaatggccgaacgaatggtgactgacggctggaaagatgcaggttacgagtatctgactattgacgattgctggatggccccacaacgggattctgagggaagacttcaggctgatccgcagcgcttccctcatggcataaggcagctggcaaaccacgtccacagtaaggggctcaaattgggaatctacgcggacgtgggcaataagacctgtgccggttttccgggatcattcgggtattatgacattgacgcccaaacgtttgctgattggggcgttgacctgctgaaattcgatggttgctacagtgacagcctcgaaaacctggcagacggctacaagcatatgtctctcgccctgaataaaaccggtcggccaatcgtatattcctgcgagtggcctctttacatgtggccatttcagaaaccgaactacacagaaattcgccagtattgcaatcattggaggaacttcgctgatatcaatgactcatgggcctccataaagagcatcttggactggaccagtcggaatcaggagcgaattgtggatgtcgcaggccctggaggatggaacgatccagacatgctggtgatcggcaattttggcctctcttgggaccagcaggttacccaaatggctctgtgggcaattatggccggtcctcttttcatgagcaacgatctgcgcgcaatctcaccacaggcaaaggccctgctccaagacaaagatgtgatagccatcaatcaggacccgttgggaaagcagggctaccagctgagaaaaggcgacaactttgaggtctgggaaaggcctttgagtggagatgcgtgggctgtggccattattaatcgccaagagatcggaggtccacgcgggtatacaattcctgtagcatctcttggcaagggcgttgcctgtaacccagcttgcttcatcactcagcttctgccggtgaagagaaaactgggtttctacgaagctaccagcaggctccgatcccacatcaaccctacaggaaccgtcctcttgcagctggagaatacgatgcagacttcactgaaggacctcctg

SEQ ID NO: 758 - protein, 398 aa, Artificial Sequence
  variant of human alpha-galactosidase A
LDNGLARTPPMGWLHWERFMCNLDCQEEPDSCISEKLFEEMAERMVTDGWKDAGYEYLTIDDCWMAPQRDSEGRLQADPQRFPHGIRQLANHVHSKGLKLGIYADVGNKTCAGFPGSFGYYDIDAQTFADWGVDLLKFDGCYSDSLENLADGYKHMSLALNKTGRPIVYSCEWPLYMWPFQKPNYTEIRQYCNHWRNFADINDSWASIKSILDWTSRNQERIVDVAGPGGWNDPDMLVIGNFGLSWDQQVTQMALWAIMAGPLFMSNDLRAISPQAKALLQDKDVIAINQDPLGKQGYQLRKGDNFEVWERPLSGDAWAVAIINRQEIGGPRGYTIPVASLGKGVACNPACFITQLLPVKRKLGFYEATSRLRSHINPTGTVLLQLENTMQTSLKDLL

SEQ ID NO: 759 - DNA, 1194 bp, Artificial Sequence
  variant of human alpha-galactosidase A
ctggataatggattggctagaacacctcctatggggtggcttcactgggagaggttcatgtgcaacctggattgtcaggaagaaccagacagctgcatctccgagaagctctttgaggaaatggccgaacgaatggtgactgacggctggaaagatgcaggttacgagtatctgactattgacgattgctggatggccccacaacgggattctgagggaagacttcaggctgatccgcagcgcttccctcatggcataaggcagctggcaaaccacgtccacagtaaggggctcaaattgggaatctacgcggacgtgggcaataagacctgtgccggttttccgggatcattcgggtattatgacattgacgcccaaacgtttgctgattggggcgttgacctgctgaaattcgatggttgctacagtgacagcctcgaaaacctggcagacggctacaagcatatgtctctcgccctgaataaaaccggtcggccaatcgtatattcctgcgagtggcctctttacatgtggccatttcagaaaccgaactacacagaaattcgccagtattgcaatcattggaggaacttcgctgatatcgatgactcatgggcctccataaagagcatcttggactggaccagtcggaatcaggagcgaattgtggatgtcgcaggccctggaggatggaacgatccagacatgctggtgatcggcaattttggcctctcttgggaccagcaggttacccaaatggctctgtgggcaattatggccggtcctcttttcatgagcaacgatctgcgcgcaatctcaccacaggcaaaggccctgctccaagacaaagatgtgatagccatcaatcaggacccgttgggaaagcagggctaccagctgagaaaaggcgacaactttgaggtctgggaaaggcctttgagtggagatgcgtgggctgtggccattattaatcggcaagagatcggaggtccacgcaattatacaattcctgtagcatctcttggcaagggcgttgcctgtaacccagcttgcttcatcactcagcttctgccggtgaagagaaaactgggtttctacgaagctaccagcaggctccgatcccacatcaaccctacaggaaccgtcctcttgcagctggagaatacgatgcagacttcactgaaggacctcctg

SEQ ID NO: 760 - protein, 398 aa, Artificial Sequence
  variant of human alpha-galactosidase A
LDNGLARTPPMGWLHWERFMCNLDCQEEPDSCISEKLFEEMAERMVTDGWKDAGYEYLTIDDCWMAPQRDSEGRLQADPQRFPHGIRQLANHVHSKGLKLGIYADVGNKTCAGFPGSFGYYDIDAQTFADWGVDLLKFDGCYSDSLENLADGYKHMSLALNKTGRPIVYSCEWPLYMWPFQKPNYTEIRQYCNHWRNFADIDDSWASIKSILDWTSRNQERIVDVAGPGGWNDPDMLVIGNFGLSWDQQVTQMALWAIMAGPLFMSNDLRAISPQAKALLQDKDVIAINQDPLGKQGYQLRKGDNFEVWERPLSGDAWAVAIINRQEIGGPRNYTIPVASLGKGVACNPACFITQLLPVKRKLGFYEATSRLRSHINPTGTVLLQLENTMQTSLKDLL

SEQ ID NO: 761 - DNA, 1194 bp, Artificial Sequence
  variant of human alpha-galactosidase A
ctggataatggattggctagaacacctcctatggggtggcttcactgggagaggttcatgtgcaacctggattgtcaggaagaaccagacagctgcatctccgagaagctctttgaggaaatggccgaacgaatggtgactgacggctggaaagatgcaggttacgagtatctgactattgacgattgctggatggccccacaacgggattctgagggaagacttcaggctgatccgcagcgcttccctcatggcataaggcagctggcaaaccacgtccacagtaaggggctcaaattgggaatctacgcggacgtgggcaataagacctgtgccggttttccgggatcattcgggtattatgacattgacgcccaaacgtttgctgattggggcgttgacctgctgaaattcgatggttgctactgtgacagcctcgaaaacctggcagacggctacaagcatatgtctctcgccctgaataaaaccggtcggccaatcgtatattcctgcgagtggcctctttacatgtggccatttcagaaaccgaactacacagaaattcgccagtattgcaatcattggaggaacttcgctgatatcaatgactcatgggcctccataaagagcatcttggactggaccagtcggaatcaggagcgaattgtggatgtcgcaggccctggaggatggaacgatccagacatgctggtgatcggcaattttggcctctcttgggaccagcaggttacccaaatggctctgtgggcaattatggccggtcctcttttcatgagcaacgatctgcgcgcgatctcaccacaggcaaaggccctgctccaagacaaagatgtgatagccatcaatcaggacccgttgggaaagcagggctaccagctgagaaaaggcgacaactttgaggtctgggaaaggcctttgagtggagatgcgtgggctgtggccattattaatcggcaagagatcggaggtccacgcaattatacaattcctgtagcatctcttggcaagggcgttgcctgtaacccagcttgctttatcactcagcttctgccggtgaagagaaaactgggtttctacgaagctaccagcaggctccgatcccacatcaaccctacaggaaccgtcctcttgcagctggagaatacgatgcagacttcactgaaggacctcctg

SEQ ID NO: 762 - protein, 398 aa, Artificial Sequence
  variant of human alpha-galactosidase A
LDNGLARTPPMGWLHWERFMCNLDCQEEPDSCISEKLFEEMAERMVTDGWKDAGYEYLTIDDCWMAPQRDSEGRLQADPQRFPHGIRQLANHVHSKGLKLGIYADVGNKTCAGFPGSFGYYDIDAQTFADWGVDLLKFDGCYCDSLENLADGYKHMSLALNKTGRPIVYSCEWPLYMWPFQKPNYTEIRQYCNHWRNFADINDSWASIKSILDWTSRNQERIVDVAGPGGWNDPDMLVIGNFGLSWDQQVTQMALWAIMAGPLFMSNDLRAISPQAKALLQDKDVIAINQDPLGKQGYQLRKGDNFEVWERPLSGDAWAVAIINRQEIGGPRNYTIPVASLGKGVACNPACFITQLLPVKRKLGFYEATSRLRSHINPTGTVLLQLENTMQTSLKDLL

SEQ ID NO: 763 - DNA, 1194 bp, Artificial Sequence
  variant of human alpha-galactosidase A
ctggataatggattggctagaacacctcctatggggtggcttcactgggagaggttcatgtgcaacctggattgtcaggaagaaccagacagctgcatctccgagaagctctttgaggaaatggccgaacgaatggtgactgacggctggaaagatgcaggttacgagtatctggtaattgacgattgctggatggccccacaacgggattctgagggaagacttcaggctgatccgcagcgcttccctcatggcataaggcagctggcaaaccacgtccacagtaaggggctcaaattgggaatctacgcggacgtgggcaataagacctgtgccggttttccgggatcattcgggtattatgacattgacgcccaaacgtttgctgattggggcgttgacctgctgaaattcgatggttgctactgtgacagcctcgaaaacctggcagacggctacaagcatatgtctctcgccctgaataaaaccggtcggccaatcgtatattcctgcgagtggcctctttacatgtggccatttcagaaaccgaactacacagaaattcgccagtattgcaatcattggaggaacttcgctgatatcgatgactcatgggcctccataaagagcatcttggactggaccagtcggaatcaggagcgaattgtggatgtcgcaggccctggaggatggaacgatccagacatgctggtgatcggcaattttggcctctcttgggaccagcaggttacccaaatggctctgtgggcaattatggccggtcctcttttcatgagcaacgatctgcgcaacatctcaccacaggcaaaggccctgctccaagacaaagatgtgatagccatcaatcaggacccgttgggaaagcagggctaccagctgagaaaaggcgacaactttgaggtctgggaaaggcctttgagtggagatgcgtgggctgtggccattattaatcggcaagagatcggaggtccacgcggttatacaattcctgtagcatctcttggcaagggcgttgcctgtaacccagcttgctttatcactcagcttctgccggtgaagagaaaactgggtttctacgaagctaccagcaggctccgatcccacatcaaccctacaggaaccgtcctcttgcagctgaataatacgactcaaacttcactgaaggacctcctg

SEQ ID NO: 764 - protein, 398 aa, Artificial Sequence
  variant of human alpha-galactosidase A
LDNGLARTPPMGWLHWERFMCNLDCQEEPDSCISEKLFEEMAERMVTDGWKDAGYEYLVIDDCWMAPQRDSEGRLQADPQRFPHGIRQLANHVHSKGLKLGIYADVGNKTCAGFPGSFGYYDIDAQTFADWGVDLLKFDGCYCDSLENLADGYKHMSLALNKTGRPIVYSCEWPLYMWPFQKPNYTEIRQYCNHWRNFADIDDSWASIKSILDWTSRNQERIVDVAGPGGWNDPDMLVIGNFGLSWDQQVTQMALWAIMAGPLFMSNDLRNISPQAKALLQDKDVIAINQDPLGKQGYQLRKGDNFEVWERPLSGDAWAVAIINRQEIGGPRGYTIPVASLGKGVACNPACFITQLLPVKRKLGFYEATSRLRSHINPTGTVLLQLNNTTQTSLKDLL

SEQ ID NO: 765 - DNA, 1194 bp, Artificial Sequence
  variant of human alpha-galactosidase A
ctggataatggattggctagaacacctcctatggggtggcttcactgggagaggttcatgtgcaacctggactgtcaggaagaaccagacagctgcatctccgagaagctctttgaggaaatggccgaacgaatggtgactgacggctggaaagatgcaggttacgagtatctggtaattgacgattgctggatggccccacaacgggattctgagggaagacttcaggctgatccgcagcgcttccctcatggcataaggcagctggcaaaccacgtccacagtaaggggctcaaattgggaatctacgcggacgtgggcaataagacctgtgccggttttccgggatcattcgggtattatgacattgacgcccaaacgtttgctgattggggcgttgacctgctgaaattcgatggttgctacagtgacagcctcgaaaacctggcagacggctacaagcatatgtctctcgccctgaataaaaccggtcggccaatcgtatattcctgcgagtggcctctttacatgtggccatttcagaaaccgaactacacagaaattcgccagtattgcaatcattggaggaacttcgctgatatcaatgactcatgggcctccataaagagcatcttggactggaccagtcggaatcaggagcgaattgtggatgtcgcaggccctggaggatggaacgatccagacatgctggtgatcggcaattttggcctctcttgggaccagcaggttacccaaatggctctgtgggcaattatggccggtcctcttttcatgagcaacgatctgcgcaacatctcaccacaggcaaaggccctgctccaagacaaagatgtgatagccatcaatcaggacccgttgggaaagcagggctaccagctgagaaaaggcgacaactttgaggtctgggaaaggcctttgagtggagatgcgtgggctgtggccattattaatcggcaagagatcggaggtccacgcaattatacaattcctgtagcatctcttggcaagggcgttgcctgtaacccagcttgctttatcactcagcttctgccggtgaagagaaaactgggtttctacgaagctaccagcaggctccgatcccacatcaaccctacaggaaccgtcctcttgcagctggagaatacgatgcagacttcactgaaggacctcctg

SEQ ID NO: 766 - protein, 398 aa, Artificial Sequence
  variant of human alpha-galactosidase A
LDNGLARTPPMGWLHWERFMCNLDCQEEPDSCISEKLFEEMAERMVTDGWKDAGYEYLVIDDCWMAPQRDSEGRLQADPQRFPHGIRQLANHVHSKGLKLGIYADVGNKTCAGFPGSFGYYDIDAQTFADWGVDLLKFDGCYSDSLENLADGYKHMSLALNKTGRPIVYSCEWPLYMWPFQKPNYTEIRQYCNHWRNFADINDSWASIKSILDWTSRNQERIVDVAGPGGWNDPDMLVIGNFGLSWDQQVTQMALWAIMAGPLFMSNDLRNISPQAKALLQDKDVIAINQDPLGKQGYQLRKGDNFEVWERPLSGDAWAVAIINRQEIGGPRNYTIPVASLGKGVACNPACFITQLLPVKRKLGFYEATSRLRSHINPTGTVLLQLENTMQTSLKDLL

SEQ ID NO: 767 - DNA, 1194 bp, Artificial Sequence
  variant of human alpha-galactosidase A
ctggataatggattggctagaacacctcctatggggtggcttcactgggagaggttcatgtgcaacctggactgtcaggaagaaccagacagctgcatctccgagaagctctttgaggaaatggccgaacgaatggtgactgacggctggaaagatgcaggttacgagtatctgtgtattgacgattgctggatggccccacaacgggattctgagggaagacttcaggctgatccgcagcgcttccctcatggcataaggcagctggcaaaccacgtccacagtaaggggctcaaattgggaatctacgcggacgtgggcaataagacctgtgccggttttccgggatcattcgggtattatgagattgacgcccaaacgtttgctgattggggcgttgacctgctgaaattcgatggttgctactgtgacagcctcgaaaacctggcagacggctacaagcatatgtctctcgccctgaataaaaccggtcggccaatcgtatattcctgcgagtggcctctttacatgtggccatttcagaaaccgaactacacagaaattcgccagtattgcaatcattggaggaacttcgctgatatcgatgactcatgggcctccataaagagcatcttggactggaccagtcggaatcaggagcgaattgtggatgtcgcaggccctggaggatggaacgatccagacatgctggtgatcggcaattttggcctctcttgggaccagcaggttacccaaatggctctgtgggcaattatggccggtcctcttttcatgagcaacgatctgcgcgcgatctcaccacaggcaaaggccctgctccaagacaaagatgtgatagccatcaatcaggacccgttgggaaagcagggctaccagctgagaaaaggcgacaactttgaggtctgggaaaggcctttgagtggagatgcgtgggctgtggccattattaatcggcaagagatcggaggtccacgcggttatacaattcctgtagcatctcttggcaagggcgttgcctgtaacccagcttgcttcatcactcagcttctgccggtgaagagaaaactgggtttctacgaagctaccagcaggctccgatcccacatcaaccctacaggaaccgtcctcttgcagctggagaatacgatgcagacttcactgaaggacctcctg

SEQ ID NO: 768 - protein, 398 aa, Artificial Sequence
  variant of human alpha-galactosidase A
LDNGLARTPPMGWLHWERFMCNLDCQEEPDSCISEKLFEEMAERMVTDGWKDAGYEYLCIDDCWMAPQRDSEGRLQADPQRFPHGIRQLANHVHSKGLKLGIYADVGNKTCAGFPGSFGYYEIDAQTFADWGVDLLKFDGCYCDSLENLADGYKHMSLALNKTGRPIVYSCEWPLYMWPFQKPNYTEIRQYCNHWRNFADIDDSWASIKSILDWTSRNQERIVDVAGPGGWNDPDMLVIGNFGLSWDQQVTQMALWAIMAGPLFMSNDLRAISPQAKALLQDKDVIAINQDPLGKQGYQLRKGDNFEVWERPLSGDAWAVAIINRQEIGGPRGYTIPVASLGKGVACNPACFITQLLPVKRKLGFYEATSRLRSHINPTGTVLLQLENTMQTSLKDLL

SEQ ID NO: 769 - DNA, 1194 bp, Artificial Sequence
  variant of human alpha-galactosidase A
ctggataatggattggctagaacacctcctatggggtggcttcactgggagaggttcatgtgcaacctggactgtcaggaagaaccagacagctgcatctccgagaagctctttgaggaaatggccgaacgaatggtgactgacggctggaaagatgcaggttacgagtatctgtgtattgacgattgctggatggccccacaacgggattctgagggaagacttcaggctgatccgcagcgcttccctcatggcataaggcagctggcaaaccacgtccacagtaaggggctcaaattgggaatctacgcggacgtgggcaataagacctgtgccggttttccgggatcattcgggtattataatattgacgcccaaacgtttgctgattggggcgttgacctgctgaaattcgatggttgctactgtgacagcctcgaaaacctggcagacggctacaagcatatgtctctcgccctgaataaaaccggtcggccaatcgtatattcctgcgagtggcctctttacatgtggccatttcagaaaccgaactacacagaaattcgccagtattgcaatcattggaggaacttcgctgatatcgatgactcatgggcctccataaagagcatcttggactggaccagtcggaatcaggagcgaattgtggatgtcgcaggccctggaggatggaacgatccagacatgctggtgatcggcaattttggcctctcttgggaccagcaggttacccaaatggctctgtgggcaattatggccggtcctcttttcatgagcaacgatctgcgcgcgatctcaccacaggcaaaggccctgctccaagacaaagatgtgatagccatcaatcaggacccgttgggaaagcagggctaccagctgagaaaaggcgacaactttgaggtctgggaaaggcctttgagtggagatgcgtgggctgtggccattattaatcggcaagagatcggaggtccacgcggttatacaattcctgtagcatctcttggcaagggcgttgcctgtaacccagcttgcttcatcactcagcttctgccggtgaagagaaaactgggtttctacgaagctaccagcaggctccgatcccacatcaaccctacaggaaccgtcctcttgcagctggagaatacgatgcagacttcactgaaggacctcctg

SEQ ID NO: 770 - protein, 398 aa, Artificial Sequence
  variant of human alpha-galactosidase A
LDNGLARTPPMGWLHWERFMCNLDCQEEPDSCISEKLFEEMAERMVTDGWKDAGYEYLCIDDCWMAPQRDSEGRLQADPQRFPHGIRQLANHVHSKGLKLGIYADVGNKTCAGFPGSFGYYNIDAQTFADWGVDLLKFDGCYCDSLENLADGYKHMSLALNKTGRPIVYSCEWPLYMWPFQKPNYTEIRQYCNHWRNFADIDDSWASIKSILDWTSRNQERIVDVAGPGGWNDPDMLVIGNFGLSWDQQVTQMALWAIMAGPLFMSNDLRAISPQAKALLQDKDVIAINQDPLGKQGYQLRKGDNFEVWERPLSGDAWAVAIINRQEIGGPRGYTIPVASLGKGVACNPACFITQLLPVKRKLGFYEATSRLRSHINPTGTVLLQLENTMQTSLKDLL

SEQ ID NO: 771 - DNA, 1194 bp, Artificial Sequence
  variant of human alpha-galactosidase A
ctggataatggattggctagaacacctcctatggggtggcttcactgggagaggttcatgtgcaacctggactgtcaggaagaaccagacagctgcatctccgagaagctctttgaggaaatggccgaacgaatggtgactgacggctggaaagatgcaggttacgagtatctgtgtattgacgattgctggatggccccacaacgggattctgagggaagacttcaggctgatccgcagcgcttccctcatggcataaggcagctggcaaaccacgtccacagtaaggggctcaaattgggaatctacgcggacgtgggcaataagacctgtgccggttttccgggatcattcgggtattattcgattgacgcccaaacgtttgctgattggggcgttgacctgctgaaattcgatggttgctactgtgacagcctcgaaaacctggcagacggctacaagcatatgtctctcgccctgaataaaaccggtcggccaatcgtatattcctgcgagtggcctctttacatgtggccatttcagaaaccgaactacacagaaattcgccagtattgcaatcattggaggaacttcgctgatatcgatgactcatgggcctccataaagagcatcttggactggaccagtcggaatcaggagcgaattgtggatgtcgcaggccctggaggatggaacgatccagacatgctggtgatcggcaattttggcctctcttgggaccagcaggttacccaaatggctctgtgggcaattatggccggtcctcttttcatgagcaacgatctgcgcgcgatctcaccacaggcaaaggccctgctccaagacaaagatgtgatagccatcaatcaggacccgttgggaaagcagggctaccagctgagaaaaggcgacaactttgaggtctgggaaaggcctttgagtggagatgcgtgggctgtggccattattaatcggcaagagatcggaggtccacgcggttatacaattcctgtagcatctcttggcaagggcgttgcctgtaacccagcttgcttcatcactcagcttctgccggtgaagagaaaactgggtttctacgaagctaccagcaggctccgatcccacatcaaccctacaggaaccgtcctcttgcagctggagaatacgatgcagacttcactgaaggacctcctg

SEQ ID NO: 772 - protein, 398 aa, Artificial Sequence
  variant of human alpha-galactosidase A
LDNGLARTPPMGWLHWERFMCNLDCQEEPDSCISEKLFEEMAERMVTDGWKDAGYEYLCIDDCWMAPQRDSEGRLQADPQRFPHGIRQLANHVHSKGLKLGIYADVGNKTCAGFPGSFGYYSIDAQTFADWGVDLLKFDGCYCDSLENLADGYKHMSLALNKTGRPIVYSCEWPLYMWPFQKPNYTEIRQYCNHWRNFADIDDSWASIKSILDWTSRNQERIVDVAGPGGWNDPDMLVIGNFGLSWDQQVTQMALWAIMAGPLFMSNDLRAISPQAKALLQDKDVIAINQDPLGKQGYQLRKGDNFEVWERPLSGDAWAVAIINRQEIGGPRGYTIPVASLGKGVACNPACFITQLLPVKRKLGFYEATSRLRSHINPTGTVLLQLENTMQTSLKDLL

SEQ ID NO: 773 - DNA, 1194 bp, Artificial Sequence
  variant of human alpha-galactosidase A
ctggataatggattggctagaacacctcctatggggtggcttcactgggagaggttcatgtgcaacctggattgtcaggaagaaccagacagctgcatctccgagaagctctttgaggaaatggccgaacgaatggtgactgacggctggaaagatgcaggttacgagtatctgtgcattgacgattgctggatggccccacaacgggattctgagggaagacttcaggctgatccgcagcgcttccctcatggcataaggcagctggcaaaccacgtccacagtaaggggctcaaattgggaatctacgcggacgtgggcaataagacctgtgccggttttccgggatcattcgggtattatgacattgacgcccaaacgtttgctgattggggcgttgacctgctgaaattcgatggttgctactgtgacagcctcgaaaacctggcagacggctacaagcatatgtctctcgccctgaataaaaccggtcggccaatcgtatattcctgcgagtggcctctttacatgtggccatttcagaaaccgaactacacagaaattcgccagtattgcaatcattggaggaacttcgctgatatcaatgactcatgggcctccataaagagcatcttggactggaccagtcggaatcaggagcgaattgtggatgtcgcaggccctggaggatggaacgatccagacatgctggtgatcggcaattttggcctctcttgggaccagcaggttacccaaatggctctgtgggcaattatggccggtcctcttttcatgagcaacgatctgcgcgcaatctcaccacaggcaaaggccctgctccaagacaaagatgtgatagccatcaatcaggacccgttgggaaagcagggctaccagctgagaaaaggcgacaactttgaggtctgggaaaggcctttgagtggagatgcgtgggctgtggccattattaatcggcaagagatcggaggtccacgcgggtatacaattcctgtagcatctcttggcaagggcgttgcctgtaacccagcttgctttatcactcagcttctgccggtgaagagaaaactgggtttctacgaagctaccagcaggctccgatcccacatcaaccctacaggaaccgtcctcttgcagctggagaatacgatgcagacttcactgaaggacctcctg

SEQ ID NO: 774 - protein, 398 aa, Artificial Sequence
  variant of human alpha-galactosidase A
LDNGLARTPPMGWLHWERFMCNLDCQEEPDSCISEKLFEEMAERMVTDGWKDAGYEYLCIDDCWMAPQRDSEGRLQADPQRFPHGIRQLANHVHSKGLKLGIYADVGNKTCAGFPGSFGYYDIDAQTFADWGVDLLKFDGCYCDSLENLADGYKHMSLALNKTGRPIVYSCEWPLYMWPFQKPNYTEIRQYCNHWRNFADINDSWASIKSILDWTSRNQERIVDVAGPGGWNDPDMLVIGNFGLSWDQQVTQMALWAIMAGPLFMSNDLRAISPQAKALLQDKDVIAINQDPLGKQGYQLRKGDNFEVWERPLSGDAWAVAIINRQEIGGPRGYTIPVASLGKGVACNPACFITQLLPVKRKLGFYEATSRLRSHINPTGTVLLQLENTMQTSLKDLL

SEQ ID NO: 775 - DNA, 1194 bp, Artificial Sequence
  variant of human alpha-galactosidase A
ctggataatggattggctagaacacctcctatggggtggcttcactgggagaggttcatgtgcaacctggattgtcaggaagaaccagacagctgcatctccgagaagctctttgaggaaatggccgaacgaatggtgactgacggctggaaagatgcaggttacgagtatctgtgtattgacgattgctggatggccccacaacgggattctgagggaagacttcaggctgatccgcagcgcttccctcatggcataaggcagctggcaaaccacgtccacagtaaggggctcaaattgggaatctacgcggacgtgggcaataagacctgtgccggttttccgggatcattcgggtattatgacattgacgcccaaacgtttgctgattggggcgttgacctgctgaaattcgatggttgctactgtgacagcctcgaaaacctggcagacggctacaagcatatgtctctcgccctgaataaaaccggtcggccaatcgtatattcctgcgagtggcctctttacatgtggccatttcagaaaccgaactacacagaaattcgccagtattgcaatcattggaggaacttcgctgatatcaatgactcatgggcctccataaagagcatcttggactggaccagtcggaatcaggagcgaattgtggatgtcgcaggccctggaggatggaacgatccagacatgctggtgatcggcaattttggcctctcttgggaccagcaggttacccaaatggctctgtgggcaattatggccggtcctcttttcatgagcaacgatctgcgcgcaatctcaccacaggcaaaggccctgctccaagacaaagatgtgatagccatcaatcaggacccgttgggaaagcagggctaccagctgagaaaaggcgacaactttgaggtctgggaaaggcctttgagtggagatgcgtgggctgtggccattattaatcggcaagagatcggaggtccacgcaattatacaattcctgtagcatctcttggcaagggcgttgcctgtaacccagcttgctttatcactcagcttctgccggtgaagagaaaactgggtttctacgaagctaccagcaggctccgatcccacatcaaccctacaggaaccgtcctcttgcagctggaaaatacgatgcaaacttcactgaaggacctcctg

SEQ ID NO: 776 - protein, 398 aa, Artificial Sequence
  variant of human alpha-galactosidase A
LDNGLARTPPMGWLHWERFMCNLDCQEEPDSCISEKLFEEMAERMVTDGWKDAGYEYLCIDDCWMAPQRDSEGRLQADPQRFPHGIRQLANHVHSKGLKLGIYADVGNKTCAGFPGSFGYYDIDAQTFADWGVDLLKFDGCYCDSLENLADGYKHMSLALNKTGRPIVYSCEWPLYMWPFQKPNYTEIRQYCNHWRNFADINDSWASIKSILDWTSRNQERIVDVAGPGGWNDPDMLVIGNFGLSWDQQVTQMALWAIMAGPLFMSNDLRAISPQAKALLQDKDVIAINQDPLGKQGYQLRKGDNFEVWERPLSGDAWAVAIINRQEIGGPRNYTIPVASLGKGVACNPACFITQLLPVKRKLGFYEATSRLRSHINPTGTVLLQLENTMQTSLKDLL

SEQ ID NO: 777 - DNA, 1194 bp, Artificial Sequence
  variant of human alpha-galactosidase A
ctggataatggattggctagaacacctcctatggggtggcttcactgggagaggttcatgtgcaacctgtcgtgtcaggaagaaccagacagctgcatctccgagaagctctttgaggaaatggccgaacgaatggtgactgacggctggaaagatgcaggttacgagtatctgtgtattgacgattgctggatggccccacaacgggattctgagggaagacttcaggctgatccgcagcgcttccctcatggcataaggcagctggcaaaccacgtccacagtaaggggctcaaattgggaatctacgcggacgtgggcaataagacctgtgccggttttccgggatcattcgggtattatgacattgacgcccaaacgtttgctgattggggcgttgacctgctgaaattcgatggttgctactgtgacagcctcgaaaacctggcagacggctacaagcatatgtctctcgccctgaataaaaccggtcggccaatcgtatattcctgcgagtggcctctttacatgtggccatttcagaaaccgaactacacagaaattcgccagtattgcaatcattggaggaacttcgctgatatcgatgactcatgggcctccataaagagcatcttggactggaccagtcggaatcaggagcgaattgtggatgtcgcaggccctggaggatggaacgatccagacatgctggtgatcggcaattttggcctctcttgggaccagcaggttacccaaatggctctgtgggcaattatggccggtcctcttttcatgagcaacgatctgcgcaacatctcaccacaggcaaaggccctgctccaagacaaagatgtgatagccatcaatcaggacccgttgggaaagcagggctaccagctgagaaaaggcgacaactttgaggtctgggaaaggcctttgagtggagatgcgtgggctgtggccattattaatcggcaagagatcggaggtccacgcgggtatacaattcctgtagcatctcttggcaagggcgttgcctgtaacccagcttgcaatatcactcagcttctgccggtgaagagaaaactgggtttctacgaagctaccagcaggctccgatcccacatcaaccctacaggaaccgtcctcttgcagctggagaatacgatgcagacttcactgaaggacctcctg

SEQ ID NO: 778 - protein, 398 aa, Artificial Sequence
  variant of human alpha-galactosidase A
LDNGLARTPPMGWLHWERFMCNLSCQEEPDSCISEKLFEEMAERMVTDGWKDAGYEYLCIDDCWMAPQRDSEGRLQADPQRFPHGIRQLANHVHSKGLKLGIYADVGNKTCAGFPGSFGYYDIDAQTFADWGVDLLKFDGCYCDSLENLADGYKHMSLALNKTGRPIVYSCEWPLYMWPFQKPNYTEIRQYCNHWRNFADIDDSWASIKSILDWTSRNQERIVDVAGPGGWNDPDMLVIGNFGLSWDQQVTQMALWAIMAGPLFMSNDLRNISPQAKALLQDKDVIAINQDPLGKQGYQLRKGDNFEVWERPLSGDAWAVAIINRQEIGGPRGYTIPVASLGKGVACNPACNITQLLPVKRKLGFYEATSRLRSHINPTGTVLLQLENTMQTSLKDLL

SEQ ID NO: 779 - DNA, 1194 bp, Artificial Sequence
  variant of human alpha-galactosidase A
ctggataatggattggctagaacacctcctatggggtggcttcactgggagaggttcatgtgcaacctgtcgtgtcaggaagaaccagacagctgcatctccgagaagctctttgaggaaatggccgaacgaatggtgactgacggctggaaagatgcaggttacgagtatctgtgtattgacgattgctggatggccccacaacgggattctgagggaagacttcaggctgatccgcagcgcttccctcatggcataaggcagctggcaaaccacgtccacagtaaggggctcaaattgggaatctacgcggacgtgggcaataagacctgtgccggttttccgggatcattcgggtattatgacattgacgcccaaacgtttgctgattggggcgttgacctgctgaaattcgatggttgctacagtaacagcctcgaaaacctggcagacggctacaagcatatgtctctcgccctgaataaaaccggtcggccaatcgtatattcctgcgagtggcctctttacatgtggccatttcagaaaccgaactacacagaaattcgccagtattgcaatcattggaggaacttcgctgatatcgatgactcatgggcctccataaagagcatcttggactggaccagtcggaatcaggagcgaattgtggatgtcgcaggccctggaggatggaacgatccagacatgctggtgatcggcaattttggcctctcttgggaccagcaggttacccaaatggctctgtgggcaattatggccggtcctcttttcatgagcaacgatctgcgcgcaatctcaccacaggcaaaggccctgctccaagacaaagatgtgatagccatcaatcaggacccgttgggaaagcagggctaccagctgagaaaaggcgacaactttgaggtctgggaaaggcctttgagtggagatgcgtgggctgtggccattattaatcggcaagagatcggaggtccacgcggttatacaattcctgtagcatctcttggcaagggcgttgcctgtaacccagcttgcttcatcactcagcttctgccggtgaagagaaaactgggtttctacgaagctaccagcaggctccgatcccacatcaaccctacaggaaccgtcctcttgcagctggagaatacgatgcagacttcactgaaggacctcctg

SEQ ID NO: 780 - protein, 398 aa, Artificial Sequence
  variant of human alpha-galactosidase A
LDNGLARTPPMGWLHWERFMCNLSCQEEPDSCISEKLFEEMAERMVTDGWKDAGYEYLCIDDCWMAPQRDSEGRLQADPQRFPHGIRQLANHVHSKGLKLGIYADVGNKTCAGFPGSFGYYDIDAQTFADWGVDLLKFDGCYSNSLENLADGYKHMSLALNKTGRPIVYSCEWPLYMWPFQKPNYTEIRQYCNHWRNFADIDDSWASIKSILDWTSRNQERIVDVAGPGGWNDPDMLVIGNFGLSWDQQVTQMALWAIMAGPLFMSNDLRAISPQAKALLQDKDVIAINQDPLGKQGYQLRKGDNFEVWERPLSGDAWAVAIINRQEIGGPRGYTIPVASLGKGVACNPACFITQLLPVKRKLGFYEATSRLRSHINPTGTVLLQLENTMQTSLKDLL

SEQ ID NO: 781 - DNA, 1194 bp, Artificial Sequence
  variant of human alpha-galactosidase A
ctggataatggattggctagaacacctcctatggggtggcttcactgggagaggttcatgtgcaacctgtcgtgtcaggaagaaccagacagctgcatctccgagaagctctttgaggaaatggccgaacgaatggtgactgacggctggaaagatgcaggttacgagtatctgtgtattgacgattgctggatggccccacaacgggattctgagggaagacttcaggctgatccgcagcgcttccctcatggcataaggcagctggcaaaccacgtccacagtaaggggctcaaattgggaatctacgcggacgtgggcaataagacctgtgccggttttccgggatcattcgggtattatgacattgacgcccaaacgtttgctgattggggcgttgacctgctgaaattcgatggttgctacagtgacagcctcgaaaacctggcagacggctacaagcatatgtctctcgccctgaataaaaccggtcggccaatcgtatattcctgcgagtggcctctttacatgtggccatttcagaaaccgaactacacagaaattcgccagtattgcaatcattggaggaacttcgctgatatcaatgactcatgggcctccataaagagcatcttggactggaccagtcggaatcaggagcgaattgtggatgtcgcaggccctggaggatggaacgatccagacatgctggtgatcggcaattttggcctctcttgggaccagcaggttacccaaatggctctgtgggcaattatggccggtcctcttttcatgagcaacgatctgcgcgcgatctcaccacaggcaaaggccctgctccaagacaaagatgtgatagccatcaatcaggacccgttgggaaagcagggctaccagctgagaaaaggcgacaactttgaggtctgggaaaggcctttgagtggagatgcgtgggctgtggccattattaatcggcaagagatcggaggtccacgcgggtatacaattcctgtagcatctcttggcaagggcgttgcctgtaacccagcttgcaatatcactcagcttctgccggtgaagagaaaactgggtttctacgaagctaccagcaggctccgatcccacatcaaccctacaggaaccgtcctcttgcagctggaaaatacgaataacacttcactgaaggacctcctg

SEQ ID NO: 782 - protein, 398 aa, Artificial Sequence
  variant of human alpha-galactosidase A
LDNGLARTPPMGWLHWERFMCNLSCQEEPDSCISEKLFEEMAERMVTDGWKDAGYEYLCIDDCWMAPQRDSEGRLQADPQRFPHGIRQLANHVHSKGLKLGIYADVGNKTCAGFPGSFGYYDIDAQTFADWGVDLLKFDGCYSDSLENLADGYKHMSLALNKTGRPIVYSCEWPLYMWPFQKPNYTEIRQYCNHWRNFADINDSWASIKSILDWTSRNQERIVDVAGPGGWNDPDMLVIGNFGLSWDQQVTQMALWAIMAGPLFMSNDLRAISPQAKALLQDKDVIAINQDPLGKQGYQLRKGDNFEVWERPLSGDAWAVAIINRQEIGGPRGYTIPVASLGKGVACNPACNITQLLPVKRKLGFYEATSRLRSHINPTGTVLLQLENTNNTSLKDLL

SEQ ID NO: 783 - DNA, 1194 bp, Artificial Sequence
  variant of human alpha-galactosidase A
ctggataatggattggctagaacacctcctatggggtggcttcactgggagaggttcatgtgcaacctgtcgtgtcaggaagaaccagacagctgcatctccgagaagctctttgaggaaatggccgaacgaatggtgactgacggctggaaagatgcaggttacgagtatctgtgcattgacgattgctggatggccccacaacgggattctgagggaagacttcaggctgatccgcagcgcttccctcatggcataaggcagctggcaaaccacgtccacagtaaggggctcaaattgggaatctacgcggacgtgggcaataagacctgtgccggttttccgggatcattcgggtattatgacattgacgcccaaacgtttgctgattggggcgttgacctgctgaaattcgatggttgctacagtgacagcctcgaaaacctggcagacggctacaagcatatgtctctcgccctgaataaaaccggtcggccaatcgtatattcctgcgagtggcctctttacatgtggccatttcagaaaccgaactacacagaaattcgccagtattgcaatcattggaggaacttcgctgatatcaatgactcatgggcctccataaagagcatcttggactggaccagtcggaatcaggagcgaattgtggatgtcgcaggccctggaggatggaacgatccagacatgctggtgatcggcaattttggcctctcttgggaccagcaggttacccaaatggctctgtgggcaattatggccggtcctcttttcatgagcaacgatctgcgcgcaatctcaccacaggcaaaggccctgctccaagacaaagatgtgatagccatcaatcaggacccgttgggaaagcagggctaccagctgagaaaaggcgacaactttgaggtctgggaaaggcctttgagtggagatgcgtgggctgtggccattattaatcggcaagagatcggaggtccacgcaattatacaattcctgtagcatctcttggcaagggcgttgcctgtaacccagcttgctttatcactcagcttctgccggtgaagagaaaactgggtttctacgaagctaccagcaggctccgatcccacatcaaccctacaggaaccgtcctcttgcagctggagaatacgatgcagacttcactgaaggacctcctg

SEQ ID NO: 784 - protein, 398 aa, Artificial Sequence
  variant of human alpha-galactosidase A
LDNGLARTPPMGWLHWERFMCNLSCQEEPDSCISEKLFEEMAERMVTDGWKDAGYEYLCIDDCWMAPQRDSEGRLQADPQRFPHGIRQLANHVHSKGLKLGIYADVGNKTCAGFPGSFGYYDIDAQTFADWGVDLLKFDGCYSDSLENLADGYKHMSLALNKTGRPIVYSCEWPLYMWPFQKPNYTEIRQYCNHWRNFADINDSWASIKSILDWTSRNQERIVDVAGPGGWNDPDMLVIGNFGLSWDQQVTQMALWAIMAGPLFMSNDLRAISPQAKALLQDKDVIAINQDPLGKQGYQLRKGDNFEVWERPLSGDAWAVAIINRQEIGGPRNYTIPVASLGKGVACNPACFITQLLPVKRKLGFYEATSRLRSHINPTGTVLLQLENTMQTSLKDLL

SEQ ID NO: 785 - DNA, 1194 bp, Artificial Sequence
  variant of human alpha-galactosidase A
ctggataatggattggctagaacacctcctatggggtggcttcactgggagaggttcatgtgcaacctgtcgtgtcaggaagaaccagacagctgcatctccgagaagctctttgaggaaatggccgaacgaatggtgactgacggctggaaagatgcaggttacgagtatctgtgtattgacgattgctggatggccccacaacgggattctgagggaagacttcaggctgatccgcagcgcttccctcatggcataaggcagctggcaaaccacgtccacagtaaggggctcaaattgggaatctacgcggacgtgggcaataagacctgtgccggttttccgggatcattcgggtattatgacattgacgcccaaacgtttgctgattggggcgttgacctgctgaaattcgatggttgctacagtgacagcctcgaaaacctggcagacggctacaagcatatgtctctcgccctgaataaaaccggtcggccaatcgtatattcctgcgagtggcctctttacatgtggccatttcagaaaccgaactacacagaaattcgccagtattgcaatcattggaggaacttcgctgatatcgatgactcatgggcctccataaagagcatcttggactggaccagtcggaatcaggagcgaattgtggatgtcgcaggccctggaggatggaacgatccagacatgctggtgatcggcaattttggcctctcttgggaccagcaggttacccaaatggctctgtgggcaattatggccggtcctcttttcatgagcaacgatctgcgcgcaatctcaccacaggcaaaggccctgctccaagacaaagatgtgatagccatcaatcaggacccgttgggaaagcagggctaccagctgagaaaaggcgacaactttgaggtctgggaaaggcctttgagtggagatgcgtgggctgtggccattattaatcggcaagagatcggaggtccacgcaattatacaattcctgtagcatctcttggcaagggcgttgcctgtaacccagcttgcaatatcactcagcttctgccggtgaagagaaaactgggtttctacgaagctaccagcaggctccgatcccacatcaaccctacaggaaccgtcctcttgcagctgaataatacgactaacacttcactgaaggacctcctg

SEQ ID NO: 786 - protein, 398 aa, Artificial Sequence
  variant of human alpha-galactosidase A
LDNGLARTPPMGWLHWERFMCNLSCQEEPDSCISEKLFEEMAERMVTDGWKDAGYEYLCIDDCWMAPQRDSEGRLQADPQRFPHGIRQLANHVHSKGLKLGIYADVGNKTCAGFPGSFGYYDIDAQTFADWGVDLLKFDGCYSDSLENLADGYKHMSLALNKTGRPIVYSCEWPLYMWPFQKPNYTEIRQYCNHWRNFADIDDSWASIKSILDWTSRNQERIVDVAGPGGWNDPDMLVIGNFGLSWDQQVTQMALWAIMAGPLFMSNDLRAISPQAKALLQDKDVIAINQDPLGKQGYQLRKGDNFEVWERPLSGDAWAVAIINRQEIGGPRNYTIPVASLGKGVACNPACNITQLLPVKRKLGFYEATSRLRSHINPTGTVLLQLNNTTNTSLKDLL

SEQ ID NO: 787 - DNA, 1194 bp, Artificial Sequence
  variant of human alpha-galactosidase A
ctggataatggattggctagaacacctcctatggggtggcttcactgggagaggttcatgtgcaacctgtcgtgtcaggaagaaccagacagctgcatctccgagaagctctttgaggaaatggccgaacgaatggtgactgacggctggaaagatgcaggttacgagtatctgtgtattgacgattgctggatggccccacaacgggattctgagggaagacttcaggctgatccgcagcgcttccctcatggcataaggcagctggcaaaccacgtccacagtaaggggctcaaattgggaatctacgcggacgtgggcaataagacctgtgccggttttccgggatcattcgggtattatgacattgacgcccaaacgtttgctgattggggcgttgacctgctgaaattcgatggttgctacagtgacagcctcgaaaacctggcagacggctacaagcatatgtctctcgccctgaataaaaccggtcggccaatcgtatattcctgcgagtggcctctttacatgtggccatttcagaaaccgaactacacagaaattcgccagtattgcaatcattggaggaacttcgctgatatcgatgactcatgggcctccataaagagcatcttggactggaccagtcggaatcaggagcgaattgtggatgtcgcaggccctggaggatggaacgatccagacatgctggtgatcggcaattttggcctctcttgggaccagcaggttacccaaatggctctgtgggcaattatggccggtcctcttttcatgagcaacgatctgcgcgcaatctcaccacaggcaaaggccctgctccaagacaaagatgtgatagccatcaatcaggacccgttgggaaagcagggctaccagctgagaaaaggcgacaactttgaggtctgggaaaggcctttgagtggagatgcgtgggctgtggccattattaatcggcaagagatcggaggtccacgcggttatacaattcctgtagcatctcttggcaagggcgttgcctgtaacccagcttgcttcatcactcagcttctgccggtgaagagaaaactgggtttctacgaagctaccagcaggctccgatcccacatcaaccctacaggaaccgtcctcttgcagctggaaaatacgactaacacttcactgaaggacctcctg

SEQ ID NO: 788 - protein, 398 aa, Artificial Sequence
  variant of human alpha-galactosidase A
LDNGLARTPPMGWLHWERFMCNLSCQEEPDSCISEKLFEEMAERMVTDGWKDAGYEYLCIDDCWMAPQRDSEGRLQADPQRFPHGIRQLANHVHSKGLKLGIYADVGNKTCAGFPGSFGYYDIDAQTFADWGVDLLKFDGCYSDSLENLADGYKHMSLALNKTGRPIVYSCEWPLYMWPFQKPNYTEIRQYCNHWRNFADIDDSWASIKSILDWTSRNQERIVDVAGPGGWNDPDMLVIGNFGLSWDQQVTQMALWAIMAGPLFMSNDLRAISPQAKALLQDKDVIAINQDPLGKQGYQLRKGDNFEVWERPLSGDAWAVAIINRQEIGGPRGYTIPVASLGKGVACNPACFITQLLPVKRKLGFYEATSRLRSHINPTGTVLLQLENTTNTSLKDLL

SEQ ID NO: 789 - DNA, 1194 bp, Artificial Sequence
  variant of human alpha-galactosidase A
ctggataatggattggctagaacacctcctatggggtggcttcactgggagaggttcatgtgcaacctgtcgtgtcaggaagaaccagacagctgcatctccgagaagctctttgaggaaatggccgaacgaatggtgactgacggctggaaagatgcaggttacgagtatctggctattgacgattgctggatggccccacaacgggattctgagggaagacttcaggctgatccgcagcgcttccctcatggcataaggcagctggcaaaccacgtccacagtaaggggctcaaattgggaatctacgcggacgtgggcaataagacctgtgccggttttccgggatcattcgggtattatgacattgacgcccaaacgtttgctgattggggcgttgacctgctgaaattcgatggttgctactgtgacagcctcgaaaacctggcagacggctacaagcatatgtctctcgccctgaataaaaccggtcggccaatcgtatattcctgcgagtggcctctttacatgtggccatttcagaaaccgaactacacagaaattcgccagtattgcaatcattggaggaacttcgctgatatcgatgactcatgggcctccataaagagcatcttggactggaccagtcggaatcaggagcgaattgtggatgtcgcaggccctggaggatggaacgatccagacatgctggtgatcggcaattttggcctctcttgggaccagcaggttacccaaatggctctgtgggcaattatggccggtcctcttttcatgagcaacgatctgcgcgcgatctcaccacaggcaaaggccctgctccaagacaaagatgtgatagccatcaatcaggacccgttgggaaagcagggctaccagctgagaaaaggcgacaactttgaggtctgggaaaggcctttgagtggagatgcgtgggctgtggccattattaatcggcaagagatcggaggtccacgcgggtatacaattcctgtagcatctcttggcaagggcgttgcctgtaacccagcttgctttatcactcagcttctgccggtgaagagaaaactgggtttctacgaagctaccagcaggctccgatcccacatcaaccctacaggaaccgtcctcttgcagctggaaaatacgatgcaaacttcactgaaggacctcctg

SEQ ID NO: 790 - protein, 398 aa, Artificial Sequence
  variant of human alpha-galactosidase A
LDNGLARTPPMGWLHWERFMCNLSCQEEPDSCISEKLFEEMAERMVTDGWKDAGYEYLAIDDCWMAPQRDSEGRLQADPQRFPHGIRQLANHVHSKGLKLGIYADVGNKTCAGFPGSFGYYDIDAQTFADWGVDLLKFDGCYCDSLENLADGYKHMSLALNKTGRPIVYSCEWPLYMWPFQKPNYTEIRQYCNHWRNFADIDDSWASIKSILDWTSRNQERIVDVAGPGGWNDPDMLVIGNFGLSWDQQVTQMALWAIMAGPLFMSNDLRAISPQAKALLQDKDVIAINQDPLGKQGYQLRKGDNFEVWERPLSGDAWAVAIINRQEIGGPRGYTIPVASLGKGVACNPACFITQLLPVKRKLGFYEATSRLRSHINPTGTVLLQLENTMQTSLKDLL

SEQ ID NO: 791 - DNA, 1194 bp, Artificial Sequence
  variant of human alpha-galactosidase A
ctggataatggattggctagaacacctcctatggggtggcttcactgggagaggttcatgtgcaacctgtcgtgtcaggaagaaccagacagctgcatctccgagaagctctttgaggaaatggccgaacgaatggtgactgacggctggaaagatgcaggttacgagtatctgtgtattgacgattgctggatggccccacaacgggattctgagggaagacttcaggctgatccgcagcgcttccctcatggcataaggcagctggcaaaccacgtccacagtaaggggctcaaattgggaatctacgcggacgtgggcaataagacctgtgccggttttccgggatcattcgggtattatgacattgacgcccaaacgtttgctgattggggcgttgacctgctgaaattcgatggttgctactgtgacagcctcgaaaacctggcagacggctacaagcatatgtctctcgccctgaataaaaccggtcggccaatcgtatattcctgcgagtggcctctttacatgtggccatttcagaaaccgaactacacagaaattcgccagtattgcaatcattggaggaacttcgctgatatcaatgactcatgggcctccataaagagcatcttggactggaccagtcggaatcaggagcgaattgtggatgtcgcaggccctggaggatggaacgatccagacatgctggtgatcggcaattttggcctctcttgggaccagcaggttacccaaatggctctgtgggcaattatggccggtcctcttttcatgagcaacgatctgcgcgcaatctcaccacaggcaaaggccctgctccaagacaaagatgtgatagccatcaatcaggacccgttgggaaagcagggctaccagctgagaaaaggcgacaactttgaggtctgggaaaggcctttgagtggagatgcgtgggctgtggccattattaatcggcaagagatcggaggtccacgcggttatacaattcctgtagcatctcttggcaagggcgttgcctgtaacccagcttgcttcatcactcagcttctgccggtgaagagaaaactgggtttctacgaagctaccagcaggctccgatcccacatcaaccctacaggaaccgtcctcttgcagctggagaatacgatgcagacttcactgaaggacctcctg

SEQ ID NO: 792 - protein, 398 aa, Artificial Sequence
  variant of human alpha-galactosidase A
LDNGLARTPPMGWLHWERFMCNLSCQEEPDSCISEKLFEEMAERMVTDGWKDAGYEYLCIDDCWMAPQRDSEGRLQADPQRFPHGIRQLANHVHSKGLKLGIYADVGNKTCAGFPGSFGYYDIDAQTFADWGVDLLKFDGCYCDSLENLADGYKHMSLALNKTGRPIVYSCEWPLYMWPFQKPNYTEIRQYCNHWRNFADINDSWASIKSILDWTSRNQERIVDVAGPGGWNDPDMLVIGNFGLSWDQQVTQMALWAIMAGPLFMSNDLRAISPQAKALLQDKDVIAINQDPLGKQGYQLRKGDNFEVWERPLSGDAWAVAIINRQEIGGPRGYTIPVASLGKGVACNPACFITQLLPVKRKLGFYEATSRLRSHINPTGTVLLQLENTMQTSLKDLL

SEQ ID NO: 793 - DNA, 1194 bp, Artificial Sequence
  variant of human alpha-galactosidase A
ctggataatggattggctagaacacctcctatggggtggcttcactgggagaggttcatgtgcaacctgtcgtgtcaggaagaaccagacagctgcatctccgagaagctctttgaggaaatggccgaacgaatggtgactgacggctggaaagatgcaggttacgagtatctgtgtattgacgattgctggatggccccacaacgggattctgagggaagacttcaggctgatccgcagcgcttccctcatggcataaggcagctggcaaaccacgtccacagtaaggggctcaaattgggaatctacgcggacgtgggcaataagacctgtgccggttttccgggatcattcgggtattatgacattgacgcccaaacgtttgctgattggggcgttgacctgctgaaattcgatggttgctactgtgacagcctcgaaaacctggcagacggctacaagcatatgtctctcgccctgaataaaaccggtcggccaatcgtatattcctgcgagtggcctctttacatgtggccatttcagaaaccgaactacacagaaattcgccagtattgcaatcattggaggaacttcgctgatatcaatgactcatgggcctccataaagagcatcttggactggaccagtcggaatcaggagcgaattgtggatgtcgcaggccctggaggatggaacgatccagacatgctggtgatcggcaattttggcctctcttgggaccagcaggttacccaaatggctctgtgggcaattatggccggtcctcttttcatgagcaacgatctgcgcaacatctcaccacaggcaaaggccctgctccaagacaaagatgtgatagccatcaatcaggacccgttgggaaagcagggctaccagctgagaaaaggcgacaactttgaggtctgggaaaggcctttgagtggagatgcgtgggctgtggccattattaatcggcaagagatcggaggtccacgcgggtatacaattcctgtagcatctcttggcaagggcgttgcctgtaacccagcttgctttatcactcagcttctgccggtgaagagaaaactgggtttctacgaagctaccagcaggctccgatcccacatcaaccctacaggaaccgtcctcttgcagctggagaatacgatgcagacttcactgaaggacctcctg

SEQ ID NO: 794 - protein, 398 aa, Artificial Sequence
  variant of human alpha-galactosidase A
LDNGLARTPPMGWLHWERFMCNLSCQEEPDSCISEKLFEEMAERMVTDGWKDAGYEYLCIDDCWMAPQRDSEGRLQADPQRFPHGIRQLANHVHSKGLKLGIYADVGNKTCAGFPGSFGYYDIDAQTFADWGVDLLKFDGCYCDSLENLADGYKHMSLALNKTGRPIVYSCEWPLYMWPFQKPNYTEIRQYCNHWRNFADINDSWASIKSILDWTSRNQERIVDVAGPGGWNDPDMLVIGNFGLSWDQQVTQMALWAIMAGPLFMSNDLRNISPQAKALLQDKDVIAINQDPLGKQGYQLRKGDNFEVWERPLSGDAWAVAIINRQEIGGPRGYTIPVASLGKGVACNPACFITQLLPVKRKLGFYEATSRLRSHINPTGTVLLQLENTMQTSLKDLL

SEQ ID NO: 795 - DNA, 1194 bp, Artificial Sequence
  variant of human alpha-galactosidase A
ctggataatggattggctagaacacctcctatggggtggcttcactgggagaggttcatgtgcaacctgtcgtgtcaggaagaaccagacagctgcatctccgagaagctctttgaggaaatggccgaacgaatggtgactgacggctggaaagatgcaggttacgagtatctgtgtattgacgattgctggatggccccacaacgggattctgagggaagacttcaggctgatccgcagcgcttccctcatggcataaggcagctggcaaaccacgtccacagtaaggggctcaaattgggaatctacgcggacgtgggcaataagacctgtgccggttttccgggatcattcgggtattatgacattgacgcccaaacgtttgctgattggggcgttgacctgctgaaattcgatggttgctactgtgacagcctcgaaaacctggcagacggctacaagcatatgtctctcgccctgaataaaaccggtcggccaatcgtatattcctgcgagtggcctctttacatgtggccatttcagaaaccgaactacacagaaattcgccagtattgcaatcattggaggaacttcgctgatatcaatgactcatgggcctccataaagagcatcttggactggaccagtcggaatcaggagcgaattgtggatgtcgcaggccctggaggatggaacgatccagacatgctggtgatcggcaattttggcctctcttgggaccagcaggttacccaaatggctctgtgggcaattatggccggtcctcttttcatgagcaacgatctgcgcgcgatctcaccacaggcaaaggccctgctccaagacaaagatgtgatagccatcaatcaggacccgttgggaaagcagggctaccagctgagaaaaggcgacaactttgaggtctgggaaaggcctttgagtggagatgcgtgggctgtggccattattaatcggcaagagatcggaggtccacgcaattatacaattcctgtagcatctcttggcaagggcgttgcctgtaacccagcttgcaatatcactcagcttctgccggtgaagagaaaactgggtttctacgaagctaccagcaggctccgatcccacatcaaccctacaggaaccgtcctcttgcagctggagaatacgatgcagacttcactgaaggacctcctg

SEQ ID NO: 796 - protein, 398 aa, Artificial Sequence
  variant of human alpha-galactosidase A
LDNGLARTPPMGWLHWERFMCNLSCQEEPDSCISEKLFEEMAERMVTDGWKDAGYEYLCIDDCWMAPQRDSEGRLQADPQRFPHGIRQLANHVHSKGLKLGIYADVGNKTCAGFPGSFGYYDIDAQTFADWGVDLLKFDGCYCDSLENLADGYKHMSLALNKTGRPIVYSCEWPLYMWPFQKPNYTEIRQYCNHWRNFADINDSWASIKSILDWTSRNQERIVDVAGPGGWNDPDMLVIGNFGLSWDQQVTQMALWAIMAGPLFMSNDLRAISPQAKALLQDKDVIAINQDPLGKQGYQLRKGDNFEVWERPLSGDAWAVAIINRQEIGGPRNYTIPVASLGKGVACNPACNITQLLPVKRKLGFYEATSRLRSHINPTGTVLLQLENTMQTSLKDLL

SEQ ID NO: 797 - DNA, 1194 bp, Artificial Sequence
  variant of human alpha-galactosidase A
ctggataatggattggctagaacacctcctatggggtggcttcactgggagaggttcatgtgcaacctgtcgtgtcaggaagaaccagacagctgcatctccgagaagctctttgaggaaatggccgaacgaatggtgactgacggctggaaagatgcaggttacgagtatctgtgtattgacgattgctggatggccccacaacgggattctgagggaagacttcaggctgatccgcagcgcttccctcatggcataaggcagctggcaaaccacgtccacagtaaggggctcaaattgggaatctacgcggacgtgggcaataagacctgtgccggttttccgggatcattcgggtattatgacattgacgcccaaacgtttgctgattggggcgttgacctgctgaaattcgatggttgctactgtgacagcctcgaaaacctggcagacggctacaagcatatgtctctcgccctgaataaaaccggtcggccaatcgtatattcctgcgagtggcctctttacatgtggccatttcagaaaccgaactacacagaaattcgccagtattgcaatcattggaggaacttcgctgatatcgatgactcatgggcctccataaagagcatcttggactggaccagtcggaatcaggagcgaattgtggatgtcgcaggccctggaggatggaacgatccagacatgctggtgatcggcaattttggcctctcttgggaccagcaggttacccaaatggctctgtgggcaattatggccggtcctcttttcatgagcaacgatctgcgcgcaatctcaccacaggcaaaggccctgctccaagacaaagatgtgatagccatcaatcaggacccgttgggaaagcagggctaccagctgagaaaaggcgacaactttgaggtctgggaaaggcctttgagtggagatgcgtgggctgtggccattattaatcggcaagagatcggaggtccacgcggttatacaattcctgtagcatctcttggcaagggcgttgcctgtaacccagcttgcttcatcactcagcttctgccggtgaagagaaaactgggtttctacgaagctaccagcaggctccgatcccacatcaaccctacaggaaccgtcctcttgcagctgaataatacgatgaacacttcactgaaggacctcctg

SEQ ID NO: 798 - protein, 398 aa, Artificial Sequence
  variant of human alpha-galactosidase A
LDNGLARTPPMGWLHWERFMCNLSCQEEPDSCISEKLFEEMAERMVTDGWKDAGYEYLCIDDCWMAPQRDSEGRLQADPQRFPHGIRQLANHVHSKGLKLGIYADVGNKTCAGFPGSFGYYDIDAQTFADWGVDLLKFDGCYCDSLENLADGYKHMSLALNKTGRPIVYSCEWPLYMWPFQKPNYTEIRQYCNHWRNFADIDDSWASIKSILDWTSRNQERIVDVAGPGGWNDPDMLVIGNFGLSWDQQVTQMALWAIMAGPLFMSNDLRAISPQAKALLQDKDVIAINQDPLGKQGYQLRKGDNFEVWERPLSGDAWAVAIINRQEIGGPRGYTIPVASLGKGVACNPACFITQLLPVKRKLGFYEATSRLRSHINPTGTVLLQLNNTMNTSLKDLL

SEQ ID NO: 799 - DNA, 1194 bp, Artificial Sequence
  variant of human alpha-galactosidase A
ctggataatggattggctagaacacctcctatggggtggcttcactgggagaggttcatgtgcaacctgtcgtgtcaggaagaaccagacagctgcatctccgagaagctctttgaggaaatggccgaacgaatggtgactgacggctggaaagatgcaggttacgagtatctgtgtattgacgattgctggatggccccacaacgggattctgagggaagacttcaggctgatccgcagcgcttccctcatggcataaggcagctggcaaaccacgtccacagtaaggggctcaaattgggaatctacgcggacgtgggcaataagacctgtgccggttttccgggatcattcgggtattatgacattgacgcccaaacgtttgctgattggggcgttgacctgctgaaattcgatggttgctactgtgacagcctcgaaaacctggcagacggctacaagcatatgtctctcgccctgaataaaaccggtcggccaatcgtatattcctgcgagtggcctctttacatgtggccatttcagaaaccgaactacacagaaattcgccagtattgcaatcattggaggaacttcgctgatatcgatgactcatgggcctccataaagagcatcttggactggaccagtcggaatcaggagcgaattgtggatgtcgcaggccctggaggatggaacgatccagacatgctggtgatcggcaattttggcctctcttgggaccagcaggttacccaaatggctctgtgggcaattatggccggtcctcttttcatgagcaacgatctgcgcgcaatctcaccacaggcaaaggccctgctccaagacaaagatgtgatagccatcaatcaggacccgttgggaaagcagggctaccagctgagaaaaggcgacaactttgaggtctgggaaaggcctttgagtggagatgcgtgggctgtggccattattaatcggcaagagatcggaggtccacgcgggtatacaattcctgtagcatctcttggcaagggcgttgcctgtaacccagcttgcaatatcactcagcttctgccggtgaagagaaaactgggtttctacgaagctaccagcaggctccgatcccacatcaaccctacaggaaccgtcctcttgcagctgaataatacgaataacacttcactgaaggacctcctg

SEQ ID NO: 800 - protein, 398 aa, Artificial Sequence
  variant of human alpha-galactosidase A
LDNGLARTPPMGWLHWERFMCNLSCQEEPDSCISEKLFEEMAERMVTDGWKDAGYEYLCIDDCWMAPQRDSEGRLQADPQRFPHGIRQLANHVHSKGLKLGIYADVGNKTCAGFPGSFGYYDIDAQTFADWGVDLLKFDGCYCDSLENLADGYKHMSLALNKTGRPIVYSCEWPLYMWPFQKPNYTEIRQYCNHWRNFADIDDSWASIKSILDWTSRNQERIVDVAGPGGWNDPDMLVIGNFGLSWDQQVTQMALWAIMAGPLFMSNDLRAISPQAKALLQDKDVIAINQDPLGKQGYQLRKGDNFEVWERPLSGDAWAVAIINRQEIGGPRGYTIPVASLGKGVACNPACNITQLLPVKRKLGFYEATSRLRSHINPTGTVLLQLNNTNNTSLKDLL

SEQ ID NO: 801 - DNA, 1194 bp, Artificial Sequence
  variant of human alpha-galactosidase A
ctggataatggattggctagaacacctcctatggggtggcttcactgggagaggttcatgtgcaacctggactgtcaggaagaaccagacagctgcatctccgagaagctctttgaggaaatggccgaacgaatggtgactgacggctggaaagatgcaggttacgagtatctgtgtattgacgattgctggatggccccacaacgggattctgagggaagacttcaggctgatccgcagcgcttccctcatggcataaggcagctggcaaaccacgtccacagtaaggggctcaaattgggaatctacgcggacgtgggcaataagacctgtgccggttttccgggatcattcgggtattatgacattgacgcccaaacgtttgctgattggggcgttgacctgctgaaattcgatggttgctactgtgacagcctcgaaaacctggcagacggctacaagcatatgtctctcgccctgaataaaaccggtcggccaatcgtatattcctgcgagtggcctctttacatgtggccatttcagaaaccgaactacacagaaattcgccagtattgcaatcattggaggaacttcgctgatatcgatgactcatgggcctccataaagagcatcttggactggaccagtcggaatcaggagcgaattgtggatgtcgcaggccctggaggatggaacgatccagacatgctggtgatcggcaattttggcctctcttgggaccagcaggttacccaaatggctctgtgggcaattatggccggtcctcttttcatgagcaacgatctgcgcgcgatctcaccacaggcaaaggccctgctccaagacaaagcggtgatagccatcaatcaggacccgttgggaaagcagggctaccagctgagaaaaggcgacaactttgaggtctgggaaaggcctttgagtggagatgcgtgggctgtggccattattaatcggcaagagatcggaggtccacgcggttatacaattcctgtagcatctcttggcaagggcgttgcctgtaacccagcttgcttcatcactcagcttctgccggtgaagagaaaactgggtttctacgaagctaccagcaggctccgatcccacatcaaccctacaggaaccgtcctcttgcagctggagaatacgatgcagacttcactgaaggacctcctg

SEQ ID NO: 802 - protein, 398 aa, Artificial Sequence
  variant of human alpha-galactosidase A
LDNGLARTPPMGWLHWERFMCNLDCQEEPDSCISEKLFEEMAERMVTDGWKDAGYEYLCIDDCWMAPQRDSEGRLQADPQRFPHGIRQLANHVHSKGLKLGIYADVGNKTCAGFPGSFGYYDIDAQTFADWGVDLLKFDGCYCDSLENLADGYKHMSLALNKTGRPIVYSCEWPLYMWPFQKPNYTEIRQYCNHWRNFADIDDSWASIKSILDWTSRNQERIVDVAGPGGWNDPDMLVIGNFGLSWDQQVTQMALWAIMAGPLFMSNDLRAISPQAKALLQDKAVIAINQDPLGKQGYQLRKGDNFEVWERPLSGDAWAVAIINRQEIGGPRGYTIPVASLGKGVACNPACFITQLLPVKRKLGFYEATSRLRSHINPTGTVLLQLENTMQTSLKDLL

SEQ ID NO: 803 - DNA, 1194 bp, Artificial Sequence
  variant of human alpha-galactosidase A
ctggataatggattggctagaacacctcctatggggtggcttcactgggagaggttcatgtgcaacctggactgtcaggaagaaccagacagctgcatctccgagaagctctttgaggaaatggccgaacgaatggtgactgacggctggaaagatgcaggttacgagtatctgtgtattgacgattgctggatggccccacaacgggattctgagggaagacttcaggctgatccgcagcgcttccctcatggcataaggcagctggcaaaccacgtccacagtaaggggctcaaattgggaatctacgcggacgtgggcaataagacctgtgccggttttccgggatcattcgggtattatgacattgacgcccaaacgtttgctgattggggcgttgacctgctgaaattcgatggttgctactgtgacagcctcgaaaacctggcagacggctacaagcatatgtctctcgccctgaataaaaccggtcggccaatcgtatattcctgcgagtggcctctttacatgtggccatttcagaaaccgaactacacagaaattcgccagtattgcaatcattggaggaacttcgctgatatcgatgactcatgggcctccataaagagcatcttggactggaccagtcggaatcaggagcgaattgtggatgtcgcaggccctggaggatggaacgatccagacatgctggtgatcggcaattttggcctctcttgggaccagcaggttacccaaatggctctgtgggcaattatggccggtcctcttttcatgagcaacgatctgcgcgcgatctcaccacaggcaaaggccctgctccaagacaaagaggtgatagccatcaatcaggacccgttgggaaagcagggctaccagctgagaaaaggcgacaactttgaggtctgggaaaggcctttgagtggagatgcgtgggctgtggccattattaatcggcaagagatcggaggtccacgcggttatacaattcctgtagcatctcttggcaagggcgttgcctgtaacccagcttgcttcatcactcagcttctgccggtgaagagaaaactgggtttctacgaagctaccagcaggctccgatcccacatcaaccctacaggaaccgtcctcttgcagctggagaatacgatgcagacttcactgaaggacctcctg

SEQ ID NO: 804 - protein, 398 aa, Artificial Sequence
  variant of human alpha-galactosidase A
LDNGLARTPPMGWLHWERFMCNLDCQEEPDSCISEKLFEEMAERMVTDGWKDAGYEYLCIDDCWMAPQRDSEGRLQADPQRFPHGIRQLANHVHSKGLKLGIYADVGNKTCAGFPGSFGYYDIDAQTFADWGVDLLKFDGCYCDSLENLADGYKHMSLALNKTGRPIVYSCEWPLYMWPFQKPNYTEIRQYCNHWRNFADIDDSWASIKSILDWTSRNQERIVDVAGPGGWNDPDMLVIGNFGLSWDQQVTQMALWAIMAGPLFMSNDLRAISPQAKALLQDKEVIAINQDPLGKQGYQLRKGDNFEVWERPLSGDAWAVAIINRQEIGGPRGYTIPVASLGKGVACNPACFITQLLPVKRKLGFYEATSRLRSHINPTGTVLLQLENTMQTSLKDLL

SEQ ID NO: 805 - DNA, 1194 bp, Artificial Sequence
  variant of human alpha-galactosidase A
ctggataatggattggctagaacacctcctatggggtggcttcactgggagaggttcatgtgcaacctggactgtcaggaagaaccagacagctgcatctccgagaagctctttgaggaaatggccgaacgaatggtgactgacggctggaaagatgcaggttacgagtatctgtgtattgacgattgctggatggccccacaacgggattctgagggaagacttcaggctgatccgcagcgcttccctcatggcataaggcagctggcaaaccacgtccacagtaaggggctcaaattgggaatctacgcggacgtgggcaataagacctgtgccggttttccgggatcattcgggtattatgacattgacgcccaaacgtttgctgattggggcgttgacctgctgaaattcgatggttgctactgtgacagcctcgaaaacctggcagacggctacaagcatatgtctctcgccctgaataaaaccggtcggccaatcgtatattcctgcgagtggcctctttacatgtggccatttcagaaaccgaactacacagaaattcgccagtattgcaatcattggaggaacttcgctgatatcgatgactcatgggcctccataaagagcatcttggactggaccagtcggaatcaggagcgaattgtggatgtcgcaggccctggaggatggaacgatccagacatgctggtgatcggcaattttggcctctcttgggaccagcaggttacccaaatggctctgtgggcaattatggccggtcctcttttcatgagcaacgatctgcgcgcgatctcaccacaggcaaaggccctgctccaagacaaaggtgtgatagccatcaatcaggacccgttgggaaagcagggctaccagctgagaaaaggcgacaactttgaggtctgggaaaggcctttgagtggagatgcgtgggctgtggccattattaatcggcaagagatcggaggtccacgcggttatacaattcctgtagcatctcttggcaagggcgttgcctgtaacccagcttgcttcatcactcagcttctgccggtgaagagaaaactgggtttctacgaagctaccagcaggctccgatcccacatcaaccctacaggaaccgtcctcttgcagctggagaatacgatgcagacttcactgaaggacctcctg

SEQ ID NO: 806 - protein, 398 aa, Artificial Sequence
  variant of human alpha-galactosidase A
LDNGLARTPPMGWLHWERFMCNLDCQEEPDSCISEKLFEEMAERMVTDGWKDAGYEYLCIDDCWMAPQRDSEGRLQADPQRFPHGIRQLANHVHSKGLKLGIYADVGNKTCAGFPGSFGYYDIDAQTFADWGVDLLKFDGCYCDSLENLADGYKHMSLALNKTGRPIVYSCEWPLYMWPFQKPNYTEIRQYCNHWRNFADIDDSWASIKSILDWTSRNQERIVDVAGPGGWNDPDMLVIGNFGLSWDQQVTQMALWAIMAGPLFMSNDLRAISPQAKALLQDKGVIAINQDPLGKQGYQLRKGDNFEVWERPLSGDAWAVAIINRQEIGGPRGYTIPVASLGKGVACNPACFITQLLPVKRKLGFYEATSRLRSHINPTGTVLLQLENTMQTSLKDLL

SEQ ID NO: 807 - DNA, 1194 bp, Artificial Sequence
  variant of human alpha-galactosidase A
ctggataatggattggctagaacacctcctatggggtggcttcactgggagaggttcatgtgcaacctggactgtcaggaagaaccagacagctgcatctccgagaagctctttgaggaaatggccgaacgaatggtgactgacggctggaaagatgcaggttacgagtatctgtgtattgacgattgctggatggccccacaacgggattctgagggaagacttcaggctgatccgcagcgcttccctcatggcataaggcagctggcaaaccacgtccacagtaaggggctcaaattgggaatctacgcggacgtgggcaataagacctgtgccggttttccgggatcattcgggtattatgacattgacgcccaaacgtttgctgattggggcgttgacctgctgaaattcgatggttgctactgtgacagcctcgaaaacctggcagacggctacaagcatatgtctctcgccctgaataaaaccggtcggccaatcgtatattcctgcgagtggcctctttacatgtggccatttcagaaaccgaactacacagaaattcgccagtattgcaatcattggaggaacttcgctgatatcgatgactcatgggcctccataaagagcatcttggactggaccagtcggaatcaggagcgaattgtggatgtcgcaggccctggaggatggaacgatccagacatgctggtgatcggcaattttggcctctcttgggaccagcaggttacccaaatggctctgtgggcaattatggccggtcctcttttcatgagcaacgatctgcgcgcgatctcaccacaggcaaaggccctgctccaagacaaacttgtgatagccatcaatcaggacccgttgggaaagcagggctaccagctgagaaaaggcgacaactttgaggtctgggaaaggcctttgagtggagatgcgtgggctgtggccattattaatcggcaagagatcggaggtccacgcggttatacaattcctgtagcatctcttggcaagggcgttgcctgtaacccagcttgcttcatcactcagcttctgccggtgaagagaaaactgggtttctacgaagctaccagcaggctccgatcccacatcaaccctacaggaaccgtcctcttgcagctggagaatacgatgcagacttcactgaaggacctcctg

SEQ ID NO: 808 - protein, 398 aa, Artificial Sequence
  variant of human alpha-galactosidase A
LDNGLARTPPMGWLHWERFMCNLDCQEEPDSCISEKLFEEMAERMVTDGWKDAGYEYLCIDDCWMAPQRDSEGRLQADPQRFPHGIRQLANHVHSKGLKLGIYADVGNKTCAGFPGSFGYYDIDAQTFADWGVDLLKFDGCYCDSLENLADGYKHMSLALNKTGRPIVYSCEWPLYMWPFQKPNYTEIRQYCNHWRNFADIDDSWASIKSILDWTSRNQERIVDVAGPGGWNDPDMLVIGNFGLSWDQQVTQMALWAIMAGPLFMSNDLRAISPQAKALLQDKLVIAINQDPLGKQGYQLRKGDNFEVWERPLSGDAWAVAIINRQEIGGPRGYTIPVASLGKGVACNPACFITQLLPVKRKLGFYEATSRLRSHINPTGTVLLQLENTMQTSLKDLL

SEQ ID NO: 809 - DNA, 1194 bp, Artificial Sequence
  variant of human alpha-galactosidase A
ctggataatggattggctagaacacctcctatggggtggcttcactgggagaggttcatgtgcaacctggactgtcaggaagaaccagacagctgcatctccgagaagctctttgaggaaatggccgaacgaatggtgactgacggctggaaagatgcaggttacgagtatctgtgtattgacgattgctggatggccccacaacgggattctgagggaagacttcaggctgatccgcagcgcttccctcatggcataaggcagctggcaaaccacgtccacagtaaggggctcaaattgggaatctacgcggacgtgggcaataagacctgtgccggttttccgggatcattcgggtattatgacattgacgcccaaacgtttgctgattggggcgttgacctgctgaaattcgatggttgctactgtgacagcctcgaaaacctggcagacggctacaagcatatgtctctcgccctgaataaaaccggtcggccaatcgtatattcctgcgagtggcctctttacatgtggccatttcagaaaccgaactacacagaaattcgccagtattgcaatcattggaggaacttcgctgatatcgatgactcatgggcctccataaagagcatcttggactggaccagtcggaatcaggagcgaattgtggatgtcgcaggccctggaggatggaacgatccagacatgctggtgatcggcaattttggcctctcttgggaccagcaggttacccaaatggctctgtgggcaattatggccggtcctcttttcatgagcaacgatctgcgcgcgatctcaccacaggcaaaggccctgctccaagacaaaatggtgatagccatcaatcaggacccgttgggaaagcagggctaccagctgagaaaaggcgacaactttgaggtctgggaaaggcctttgagtggagatgcgtgggctgtggccattattaatcggcaagagatcggaggtccacgcggttatacaattcctgtagcatctcttggcaagggcgttgcctgtaacccagcttgcttcatcactcagcttctgccggtgaagagaaaactgggtttctacgaagctaccagcaggctccgatcccacatcaaccctacaggaaccgtcctcttgcagctggagaatacgatgcagacttcactgaaggacctcctg

SEQ ID NO: 810 - protein, 398 aa, Artificial Sequence
  variant of human alpha-galactosidase A
LDNGLARTPPMGWLHWERFMCNLDCQEEPDSCISEKLFEEMAERMVTDGWKDAGYEYLCIDDCWMAPQRDSEGRLQADPQRFPHGIRQLANHVHSKGLKLGIYADVGNKTCAGFPGSFGYYDIDAQTFADWGVDLLKFDGCYCDSLENLADGYKHMSLALNKTGRPIVYSCEWPLYMWPFQKPNYTEIRQYCNHWRNFADIDDSWASIKSILDWTSRNQERIVDVAGPGGWNDPDMLVIGNFGLSWDQQVTQMALWAIMAGPLFMSNDLRAISPQAKALLQDKMVIAINQDPLGKQGYQLRKGDNFEVWERPLSGDAWAVAIINRQEIGGPRGYTIPVASLGKGVACNPACFITQLLPVKRKLGFYEATSRLRSHINPTGTVLLQLENTMQTSLKDLL

SEQ ID NO: 811 - DNA, 1194 bp, Artificial Sequence
  variant of human alpha-galactosidase A
ctggataatggattggctagaacacctcctatggggtggcttcactgggagaggttcatgtgcaacctggactgtcaggaagaaccagacagctgcatctccgagaagctctttgaggaaatggccgaacgaatggtgactgacggctggaaagatgcaggttacgagtatctgtgtattgacgattgctggatggccccacaacgggattctgagggaagacttcaggctgatccgcagcgcttccctcatggcataaggcagctggcaaaccacgtccacagtaaggggctcaaattgggaatctacgcggacgtgggcaataagacctgtgccggttttccgggatcattcgggtattatgacattgacgcccaaacgtttgctgattggggcgttgacctgctgaaattcgatggttgctactgtgacagcctcgaaaacctggcagacggctacaagcatatgtctctcgccctgaataaaaccggtcggccaatcgtatattcctgcgagtggcctctttacatgtggccatttcagaaaccgaactacacagaaattcgccagtattgcaatcattggaggaacttcgctgatatcgatgactcatgggcctccataaagagcatcttggactggaccagtcggaatcaggagcgaattgtggatgtcgcaggccctggaggatggaacgatccagacatgctggtgatcggcaattttggcctctcttgggaccagcaggttacccaaatggctctgtgggcaattatggccggtcctcttttcatgagcaacgatctgcgcgcgatctcaccacaggcaaaggccctgctccaagacaaaagggtgatagccatcaatcaggacccgttgggaaagcagggctaccagctgagaaaaggcgacaactttgaggtctgggaaaggcctttgagtggagatgcgtgggctgtggccattattaatcggcaagagatcggaggtccacgcggttatacaattcctgtagcatctcttggcaagggcgttgcctgtaacccagcttgcttcatcactcagcttctgccggtgaagagaaaactgggtttctacgaagctaccagcaggctccgatcccacatcaaccctacaggaaccgtcctcttgcagctggagaatacgatgcagacttcactgaaggacctcctg

SEQ ID NO: 812 - protein, 398 aa, Artificial Sequence
  variant of human alpha-galactosidase A
LDNGLARTPPMGWLHWERFMCNLDCQEEPDSCISEKLFEEMAERMVTDGWKDAGYEYLCIDDCWMAPQRDSEGRLQADPQRFPHGIRQLANHVHSKGLKLGIYADVGNKTCAGFPGSFGYYDIDAQTFADWGVDLLKFDGCYCDSLENLADGYKHMSLALNKTGRPIVYSCEWPLYMWPFQKPNYTEIRQYCNHWRNFADIDDSWASIKSILDWTSRNQERIVDVAGPGGWNDPDMLVIGNFGLSWDQQVTQMALWAIMAGPLFMSNDLRAISPQAKALLQDKRVIAINQDPLGKQGYQLRKGDNFEVWERPLSGDAWAVAIINRQEIGGPRGYTIPVASLGKGVACNPACFITQLLPVKRKLGFYEATSRLRSHINPTGTVLLQLENTMQTSLKDLL

SEQ ID NO: 813 - DNA, 1194 bp, Artificial Sequence
  variant of human alpha-galactosidase A
ctggataatggattggctagaacacctcctatggggtggcttcactgggagaggttcatgtgcaacctggactgtcaggaagaaccagacagctgcatctccgagaagctctttgaggaaatggccgaacgaatggtgactgacggctggaaagatgcaggttacgagtatctgtgtattgacgattgctggatggccccacaacgggattctgagggaagacttcaggctgatccgcagcgcttccctcatggcataaggcagctggcaaaccacgtccacagtaaggggctcaaattgggaatctacgcggacgtgggcaataagacctgtgccggttttccgggatcattcgggtattatgacattgacgcccaaacgtttgctgattggggcgttgacctgctgaaattcgatggttgctactgtgacagcctcgaaaacctggcagacggctacaagcatatgtctctcgccctgaataaaaccggtcggccaatcgtatattcctgcgagtggcctctttacatgtggccatttcagaaaccgaactacacagaaattcgccagtattgcaatcattggaggaacttcgctgatatcgatgactcatgggcctccataaagagcatcttggactggaccagtcggaatcaggagcgaattgtggatgtcgcaggccctggaggatggaacgatccagacatgctggtgatcggcaattttggcctctcttgggaccagcaggttacccaaatggctctgtgggcaattatggccggtcctcttttcatgagcaacgatctgcgcgcgatctcaccacaggcaaaggccctgctccaagacaaatcggtgatagccatcaatcaggacccgttgggaaagcagggctaccagctgagaaaaggcgacaactttgaggtctgggaaaggcctttgagtggagatgcgtgggctgtggccattattaatcggcaagagatcggaggtccacgcggttatacaattcctgtagcatctcttggcaagggcgttgcctgtaacccagcttgcttcatcactcagcttctgccggtgaagagaaaactgggtttctacgaagctaccagcaggctccgatcccacatcaaccctacaggaaccgtcctcttgcagctggagaatacgatgcagacttcactgaaggacctcctg

SEQ ID NO: 814 - protein, 398 aa, Artificial Sequence
  variant of human alpha-galactosidase A
LDNGLARTPPMGWLHWERFMCNLDCQEEPDSCISEKLFEEMAERMVTDGWKDAGYEYLCIDDCWMAPQRDSEGRLQADPQRFPHGIRQLANHVHSKGLKLGIYADVGNKTCAGFPGSFGYYDIDAQTFADWGVDLLKFDGCYCDSLENLADGYKHMSLALNKTGRPIVYSCEWPLYMWPFQKPNYTEIRQYCNHWRNFADIDDSWASIKSILDWTSRNQERIVDVAGPGGWNDPDMLVIGNFGLSWDQQVTQMALWAIMAGPLFMSNDLRAISPQAKALLQDKSVIAINQDPLGKQGYQLRKGDNFEVWERPLSGDAWAVAIINRQEIGGPRGYTIPVASLGKGVACNPACFITQLLPVKRKLGFYEATSRLRSHINPTGTVLLQLENTMQTSLKDLL

SEQ ID NO: 815 - DNA, 1194 bp, Artificial Sequence
  variant of human alpha-galactosidase A
ctgagtaatggattggctagaacacctcctatggggtggcttcactgggagaggttcatgtgcaacctggactgtcaggaagaaccagacagctgcatctccgagaagctctttgaggaaatggccgaacgaatggtgactgacggctggaaagatgcaggttacgagtatctgtgtattgacgattgctggatggccccacaacgggattctgagggaagacttcaggctgatccgcagcgcttccctcatggcataaggcagctggcaaaccacgtccacagtaaggggctcaaattgggaatctacgcggacgtgggcaataagacctgtgccggttttccgggatcattcgggtattatgacattgacgcccaaacgtttgctgattggggcgttgacctgctgaaattcgatggttgctactgtgacagcctcgaaaacctggcagacggctacaagcatatgtctctcgccctgaataaaaccggtcggccaatcgtatattcctgcgagtggcctctttacatgtggccatttcagaaaccgaactacacagaaattcgccagtattgcaatcattggaggaacttcgctgatatcgatgactcatgggcctccataaagagcatcttggactggaccagtcggaatcaggagcgaattgtggatgtcgcaggccctggaggatggaacgatccagacatgctggtgatcggcaattttggcctctcttgggaccagcaggttacccaaatggctctgtgggcaattatggccggtcctcttttcatgagcaacgatctgcgcgcgatctcaccacaggcaaaggccctgctccaagacaaagatgtgatagccatcaatcaggacccgttgggaaagcagggctaccagctgagaaaaggcgacaactttgaggtctgggaaaggcctttgagtggagatgcgtgggctgtggccattattaatcggcaagagatcggaggtccacgcggttatacaattcctgtagcatctcttggcaagggcgttgcctgtaacccagcttgcttcatcactcagcttctgccggtgaagagaaaactgggtttctacgaagctaccagcaggctccgatcccacatcaaccctacaggaaccgtcctcttgcagctggagaatacgatgcagacttcactgaaggacctcctg

SEQ ID NO: 816 - protein, 398 aa, Artificial Sequence
  variant of human alpha-galactosidase A
LSNGLARTPPMGWLHWERFMCNLDCQEEPDSCISEKLFEEMAERMVTDGWKDAGYEYLCIDDCWMAPQRDSEGRLQADPQRFPHGIRQLANHVHSKGLKLGIYADVGNKTCAGFPGSFGYYDIDAQTFADWGVDLLKFDGCYCDSLENLADGYKHMSLALNKTGRPIVYSCEWPLYMWPFQKPNYTEIRQYCNHWRNFADIDDSWASIKSILDWTSRNQERIVDVAGPGGWNDPDMLVIGNFGLSWDQQVTQMALWAIMAGPLFMSNDLRAISPQAKALLQDKDVIAINQDPLGKQGYQLRKGDNFEVWERPLSGDAWAVAIINRQEIGGPRGYTIPVASLGKGVACNPACFITQLLPVKRKLGFYEATSRLRSHINPTGTVLLQLENTMQTSLKDLL

SEQ ID NO: 817 - DNA, 1194 bp, Artificial Sequence
  variant of human alpha-galactosidase A
ctggataatggattggctagaacacctcctatggggtggcttcactgggagaggttcatgtgcaacctggactgtcaggaagaaccagacagctgcatctccgagaagctctttgaggaaatggccgaacgaatggtgactgacggctggaaagatgcaggttacgagtatctgtgtattgacgattgctggatggccccacaacgggattctgagggaagacttcaggctgatccgcagcgcttccctcatggcataaggcagctggcaaaccacgtccacagtaaggggctcaaattgggaatctacgcggacgtgggcaataagacctgtgccggttttccgggatcattcgggtattatgacattgacgcccaaacgtttgctgattggggcgttgacctgctgaaattcgatggttgctactgtgacagcctcgaaaacctggcagacggctacaagcatatgtctctcgccctgaataaaaccggtcggccaatcgtatattcctgcgagtggcctctttacatgtggccatttcagaaaccgaactacacagaaattcgccagtattgcaatcattggaggaacttcgctgatatcgatgactcatgggcctccataaagagcatcttggactggaccagtcggaatcaggagcgaattgtggatgtcgcaggccctggaggatggaacgatccagacatgctggtgatcggcaattttggcctctcttgggaccagcaggttacccaaatggctctgtgggcaattatggccggtcctcttttcatgagcaacgatctgcgcgcgatctcaccacaggcaaaggccctgctccaagacaaagatgtgatagccatcaatcaggacccgttgggaaagcagggctaccagctgagaaaaggcactaactttgaggtctgggaaaggcctttgagtggagatgcgtgggctgtggccattattaatcggcaagagatcggaggtccacgcggttatacaattcctgtagcatctcttggcaagggcgttgcctgtaacccagcttgcttcatcactcagcttctgccggtgaagagaaaactgggtttctacgaagctaccagcaggctccgatcccacatcaaccctacaggaaccgtcctcttgcagctggagaatacgatgcagacttcactgaaggacctcctg

SEQ ID NO: 818 - protein, 398 aa, Artificial Sequence
  variant of human alpha-galactosidase A
LDNGLARTPPMGWLHWERFMCNLDCQEEPDSCISEKLFEEMAERMVTDGWKDAGYEYLCIDDCWMAPQRDSEGRLQADPQRFPHGIRQLANHVHSKGLKLGIYADVGNKTCAGFPGSFGYYDIDAQTFADWGVDLLKFDGCYCDSLENLADGYKHMSLALNKTGRPIVYSCEWPLYMWPFQKPNYTEIRQYCNHWRNFADIDDSWASIKSILDWTSRNQERIVDVAGPGGWNDPDMLVIGNFGLSWDQQVTQMALWAIMAGPLFMSNDLRAISPQAKALLQDKDVIAINQDPLGKQGYQLRKGTNFEVWERPLSGDAWAVAIINRQEIGGPRGYTIPVASLGKGVACNPACFITQLLPVKRKLGFYEATSRLRSHINPTGTVLLQLENTMQTSLKDLL

SEQ ID NO: 819 - DNA, 1194 bp, Artificial Sequence
  variant of human alpha-galactosidase A
ctggataatggattggctagaacacctcctatggggtggcttcactgggagaggttcatgtgcaacctggactgtcaggaagaaccagacagctgcatctccgagaagctctttgaggaaatggccgaacgaatggtgactgacggctggaaagatgcaggttacgagtatctgtgtattgacgattgctggatggccccacaacgggattctgagggaagacttcaggctgatccgcagcgcttccctcatggcataaggcagctggcaaaccacgtccacagtaaggggctcaaattgggaatctacgcggacgtgggcaataagacctgtgccggttttccgggatcattcgggtattatgacattgacgcccaaacgtttgctgattggggcgttgacctgctgaaattcgatggttgctactgtgacagcctcgaaaacctggcagacggctacaagcatatgtctctcgccctgaataaaaccggtcggccaatcgtatattcctgcgagtggcctctttacatgtggccatttcagaaaccgaactacacagaaattcgccagtattgcaatcattggaggaacttcgctgatatcgatgactcatgggcctccataaagagcatcttggactggaccagtcggaatcaggagcgaattgtggatgtcgcaggccctggaggatggaacgatccagacatgctggtgatcggcaattttggcctctcttgggaccagcaggttacccaaatggctctgtgggcaattatggccggtcctcttttcatgagcaacgatctgcgcgcgatctcaccacaggcaaaggccctgctccaagacaaagatgtgatagccatcaatcaggacccgttgggaaagcagggctaccagctgagaaaaggcgtgaactttgaggtctgggaaaggcctttgagtggagatgcgtgggctgtggccattattaatcggcaagagatcggaggtccacgcggttatacaattcctgtagcatctcttggcaagggcgttgcctgtaacccagcttgcttcatcactcagcttctgccggtgaagagaaaactgggtttctacgaagctaccagcaggctccgatcccacatcaaccctacaggaaccgtcctcttgcagctggagaatacgatgcagacttcactgaaggacctcctg

SEQ ID NO: 820 - protein, 398 aa, Artificial Sequence
  variant of human alpha-galactosidase A
LDNGLARTPPMGWLHWERFMCNLDCQEEPDSCISEKLFEEMAERMVTDGWKDAGYEYLCIDDCWMAPQRDSEGRLQADPQRFPHGIRQLANHVHSKGLKLGIYADVGNKTCAGFPGSFGYYDIDAQTFADWGVDLLKFDGCYCDSLENLADGYKHMSLALNKTGRPIVYSCEWPLYMWPFQKPNYTEIRQYCNHWRNFADIDDSWASIKSILDWTSRNQERIVDVAGPGGWNDPDMLVIGNFGLSWDQQVTQMALWAIMAGPLFMSNDLRAISPQAKALLQDKDVIAINQDPLGKQGYQLRKGVNFEVWERPLSGDAWAVAIINRQEIGGPRGYTIPVASLGKGVACNPACFITQLLPVKRKLGFYEATSRLRSHINPTGTVLLQLENTMQTSLKDLL

SEQ ID NO: 821 - DNA, 1194 bp, Artificial Sequence
  variant of human alpha-galactosidase A
ctggataatggattggctagaacacctcctatggggtggcttcactgggagaggttcatgtgcaacctggactgtcaggaagaaccagacagctgcatctccgagaagctctttgaggaaatggccgaacgaatggtgactgacggctggaaagatgcaggttacgagtatctgtgtattgacgattgctggatggccccacaacgggattctgagggaagacttcaggctgatccgcagcgcttccctcatggcataaggcagctggcaaaccacgtccacagtaaggggctcaaattgggaatctacgcggacgtgggcaataagacctgtgccggttttccgggatcattcgggtattatgacattgacgcccaaacgtttgctgattggggcgttgacctgctgaaattcgatggttgctactgtgacagcctcgaaaacctggcagacggctacaagcatatgtctctcgccctgaataaaaccggtcggccaatcgtatattcctgcgagtggcctctttacatgtggccatttcagaaaccgaactacacagaaattcgccagtattgcaatcattggaggaacttcgctgatatcgatgactcatgggcctccataaagagcatcttggactggaccagtcggaatcaggagcgaattgtggatgtcgcaggccctggaggatggaacgatccagacatgctggtgatcggcaattttggcctctcttgggaccagcaggttacccaaatggctctgtgggcaattatggccggtcctcttttcatgagcaacgatctgcgcgcgatctcaccacaggcaaaggccctgctccaagacaaagatgtgatagccatcaatcaggacccgttgggaaagcagggctaccagctgagaaaaggctggaactttgaggtctgggaaaggcctttgagtggagatgcgtgggctgtggccattattaatcggcaagagatcggaggtccacgcggttatacaattcctgtagcatctcttggcaagggcgttgcctgtaacccagcttgcttcatcactcagcttctgccggtgaagagaaaactgggtttctacgaagctaccagcaggctccgatcccacatcaaccctacaggaaccgtcctcttgcagctggagaatacgatgcagacttcactgaaggacctcctg

SEQ ID NO: 822 - protein, 398 aa, Artificial Sequence
  variant of human alpha-galactosidase A
LDNGLARTPPMGWLHWERFMCNLDCQEEPDSCISEKLFEEMAERMVTDGWKDAGYEYLCIDDCWMAPQRDSEGRLQADPQRFPHGIRQLANHVHSKGLKLGIYADVGNKTCAGFPGSFGYYDIDAQTFADWGVDLLKFDGCYCDSLENLADGYKHMSLALNKTGRPIVYSCEWPLYMWPFQKPNYTEIRQYCNHWRNFADIDDSWASIKSILDWTSRNQERIVDVAGPGGWNDPDMLVIGNFGLSWDQQVTQMALWAIMAGPLFMSNDLRAISPQAKALLQDKDVIAINQDPLGKQGYQLRKGWNFEVWERPLSGDAWAVAIINRQEIGGPRGYTIPVASLGKGVACNPACFITQLLPVKRKLGFYEATSRLRSHINPTGTVLLQLENTMQTSLKDLL

SEQ ID NO: 823 - DNA, 1194 bp, Artificial Sequence
  variant of human alpha-galactosidase A
ctggataatggattggctagaacacctcctatggggtggcttcactgggagaggttcatgtgcaacctggactgtcaggaagaaccagacagctgcatctccgagaagctctttgaggaaatggccgaacgaatggtgactgacggctggaaagatgcaggttacgagtatctgtgtattgacgattgctggatggccccacaacgggattctgagggaagacttcaggctgatccgcagcgcttccctcatggcataaggcagctggcaaaccacgtccacagtaaggggctcaaattgggaatctacgcggacgtgggcaataagacctgtgccggttttccgggatcattcgggtattatgacattgacgcccaaacgtttgctgattggggcgttgacctgctgaaattcgatggttgctactgtgacagcctccttaacctggcagacggctacaagcatatgtctctcgccctgaataaaaccggtcggccaatcgtatattcctgcgagtggcctctttacatgtggccatttcagaaaccgaactacacagaaattcgccagtattgcaatcattggaggaacttcgctgatatcgatgactcatgggcctccataaagagcatcttggactggaccagtcggaatcaggagcgaattgtggatgtcgcaggccctggaggatggaacgatccagacatgctggtgatcggcaattttggcctctcttgggaccagcaggttacccaaatggctctgtgggcaattatggccggtcctcttttcatgagcaacgatctgcgcgcgatctcaccacaggcaaaggccctgctccaagacaaagatgtgatagccatcaatcaggacccgttgggaaagcagggctaccagctgagaaaaggcgacaactttgaggtctgggaaaggcctttgagtggagatgcgtgggctgtggccattattaatcggcaagagatcggaggtccacgcggttatacaattcctgtagcatctcttggcaagggcgttgcctgtaacccagcttgcttcatcactcagcttctgccggtgaagagaaaactgggtttctacgaagctaccagcaggctccgatcccacatcaaccctacaggaaccgtcctcttgcagctggagaatacgatgcagacttcactgaaggacctcctg

SEQ ID NO: 824 - protein, 398 aa, Artificial Sequence
  variant of human alpha-galactosidase A
LDNGLARTPPMGWLHWERFMCNLDCQEEPDSCISEKLFEEMAERMVTDGWKDAGYEYLCIDDCWMAPQRDSEGRLQADPQRFPHGIRQLANHVHSKGLKLGIYADVGNKTCAGFPGSFGYYDIDAQTFADWGVDLLKFDGCYCDSLLNLADGYKHMSLALNKTGRPIVYSCEWPLYMWPFQKPNYTEIRQYCNHWRNFADIDDSWASIKSILDWTSRNQERIVDVAGPGGWNDPDMLVIGNFGLSWDQQVTQMALWAIMAGPLFMSNDLRAISPQAKALLQDKDVIAINQDPLGKQGYQLRKGDNFEVWERPLSGDAWAVAIINRQEIGGPRGYTIPVASLGKGVACNPACFITQLLPVKRKLGFYEATSRLRSHINPTGTVLLQLENTMQTSLKDLL

SEQ ID NO: 825 - DNA, 1194 bp, Artificial Sequence
  variant of human alpha-galactosidase A
ctggataatggattggctagaacacctcctatggggtggcttcactgggagaggttcatgtgcaacctggactgtcaggaagaaccagacagctgcatctccgagaagctctttgaggaaatggccgaacgaatggtgactgacggctggaaagatgcaggttacgagtatctgtgtattgacgattgctggatggccccacaacgggattctgagggaagacttcaggctgatccgcagcgcttccctcatggcataaggcagctggcaaaccacgtccacagtaaggggctcaaattgggaatctacgcggacgtgggcaataagacctgtgccggttttccgggatcattcgggtattatgacattgacgcccaaacgtttgctgattggggcgttgacctgctgaaattcgatggttgctactgtgacagcctcagtaacctggcagacggctacaagcatatgtctctcgccctgaataaaaccggtcggccaatcgtatattcctgcgagtggcctctttacatgtggccatttcagaaaccgaactacacagaaattcgccagtattgcaatcattggaggaacttcgctgatatcgatgactcatgggcctccataaagagcatcttggactggaccagtcggaatcaggagcgaattgtggatgtcgcaggccctggaggatggaacgatccagacatgctggtgatcggcaattttggcctctcttgggaccagcaggttacccaaatggctctgtgggcaattatggccggtcctcttttcatgagcaacgatctgcgcgcgatctcaccacaggcaaaggccctgctccaagacaaagatgtgatagccatcaatcaggacccgttgggaaagcagggctaccagctgagaaaaggcgacaactttgaggtctgggaaaggcctttgagtggagatgcgtgggctgtggccattattaatcggcaagagatcggaggtccacgcggttatacaattcctgtagcatctcttggcaagggcgttgcctgtaacccagcttgcttcatcactcagcttctgccggtgaagagaaaactgggtttctacgaagctaccagcaggctccgatcccacatcaaccctacaggaaccgtcctcttgcagctggagaatacgatgcagacttcactgaaggacctcctg

SEQ ID NO: 826 - protein, 398 aa, Artificial Sequence
  variant of human alpha-galactosidase A
LDNGLARTPPMGWLHWERFMCNLDCQEEPDSCISEKLFEEMAERMVTDGWKDAGYEYLCIDDCWMAPQRDSEGRLQADPQRFPHGIRQLANHVHSKGLKLGIYADVGNKTCAGFPGSFGYYDIDAQTFADWGVDLLKFDGCYCDSLSNLADGYKHMSLALNKTGRPIVYSCEWPLYMWPFQKPNYTEIRQYCNHWRNFADIDDSWASIKSILDWTSRNQERIVDVAGPGGWNDPDMLVIGNFGLSWDQQVTQMALWAIMAGPLFMSNDLRAISPQAKALLQDKDVIAINQDPLGKQGYQLRKGDNFEVWERPLSGDAWAVAIINRQEIGGPRGYTIPVASLGKGVACNPACFITQLLPVKRKLGFYEATSRLRSHINPTGTVLLQLENTMQTSLKDLL

SEQ ID NO: 827 - DNA, 1194 bp, Artificial Sequence
  variant of human alpha-galactosidase A
ctggataatggattggctagaacacctcctatggggtggcttcactgggagaggttcatgtgcaacctggactgtcaggaagaaccagacagctgcatctccgagaagctctttgaggaaatggccgaacgaatggtgactgacggctggaaagatgcaggttacgagtatctgtgtattgacgattgctggatggccccacaacgggattctgagggaagacttcaggctgatccgcagcgcttccctcatggcataaggcagctggcaaaccacgtccacagtaaggggctcaaattgggaatctacgcggacgtgggcaataagacctgtgccggttttccgggatcattcgggtattatgacattgacgcccaaacgtttgctgattggggcgttgacctgctgaaattcgatggttgctactgtgacagcctcgaaaacctggcagacggctacaagcatatgtctctcgccctgaataaaaccggtcggccaatcgtatattcctgcgagtggcctctttacatgtggccatttcagaaaccgaactacacagaaattcgccagtattgcaatcattggaggaacttcgctgatatcgatgactcatgggcctccataaagagcatcttggactggaccagtcggaatcaggagcgaattgtggatgtcgcaggccctggaggatggaacgatccagacatgctggtgatcggcaattttggcctctcttgggaccagcaggttacccaaatggctctgtgggcaattatggccggtcctcttttcatgagcaacgatctgcgcgcgatctcaccacaggcaaaggccctgctccaagacaaagatgtgatagccatcaatcaggacccgttgggaaagcagggctaccagctgagaaaaggcgacaactttgaggtctgggaaaggcctttgagtggagatgcgtgggctgtggccattattaatcggcaagagatcggaggtccacgcggttatacaattcctgtagcatctcttggcaagggcgttgcctgtaacccagcttgcttcatcactcagcttctgccggtgaagagaaaactgggtttctacgctgctaccagcaggctccgatcccacatcaaccctacaggaaccgtcctcttgcagctggagaatacgatgcagacttcactgaaggacctcctg

SEQ ID NO: 828 - protein, 398 aa, Artificial Sequence
  variant of human alpha-galactosidase A
LDNGLARTPPMGWLHWERFMCNLDCQEEPDSCISEKLFEEMAERMVTDGWKDAGYEYLCIDDCWMAPQRDSEGRLQADPQRFPHGIRQLANHVHSKGLKLGIYADVGNKTCAGFPGSFGYYDIDAQTFADWGVDLLKFDGCYCDSLENLADGYKHMSLALNKTGRPIVYSCEWPLYMWPFQKPNYTEIRQYCNHWRNFADIDDSWASIKSILDWTSRNQERIVDVAGPGGWNDPDMLVIGNFGLSWDQQVTQMALWAIMAGPLFMSNDLRAISPQAKALLQDKDVIAINQDPLGKQGYQLRKGDNFEVWERPLSGDAWAVAIINRQEIGGPRGYTIPVASLGKGVACNPACFITQLLPVKRKLGFYAATSRLRSHINPTGTVLLQLENTMQTSLKDLL

SEQ ID NO: 829 - DNA, 1194 bp, Artificial Sequence
  variant of human alpha-galactosidase A
ctggataatggattggctagaacacctcctatggggtggcttcactgggagaggttcatgtgcaacctggactgtcaggaagaaccagacagctgcatctccgagaagctctttgaggaaatggccgaacgaatggtgactgacggctggaaagatgcaggttacgagtatctgtgtattgacgattgctggatggccccacaacgggattctgagggaagacttcaggctgatccgcagcgcttccctcatggcataaggcagctggcaaaccacgtccacagtaaggggctcaaattgggaatctacgcggacgtgggcaataagacctgtgccggttttccgggatcattcgggtattatgacattgacgcccaaacgtttgctgattggggcgttgacctgctgaaattcgatggttgctactgtgacagcctcgaaaacctggcagacggctacaagcatatgtctctcgccctgaataaaaccggtcggccaatcgtatattcctgcgagtggcctctttacatgtggccatttcagaaaccgaactacacagaaattcgccagtattgcaatcattggaggaacttcgctgatatcgatgactcatgggcctccataaagagcatcttggactggaccagtcggaatcaggagcgaattgtggatgtcgcaggccctggaggatggaacgatccagacatgctggtgatcggcaattttggcctctcttgggaccagcaggttacccaaatggctctgtgggcaattatggccggtcctcttttcatgagcaacgatctgcgcgcgatctcaccacaggcaaaggccctgctccaagacaaagatgtgatagccatcaatcaggacccgttgggaaagcagggctaccagctgagaaaaggcgacaactttgaggtctgggaaaggcctttgagtggagatgcgtgggctgtggccattattaatcggcaagagatcggaggtccacgcggttatacaattcctgtagcatctcttggcaagggcgttgcctgtaacccagcttgcttcatcactcagcttctgccggtgaagagaaaactgggtttctacgatgctaccagcaggctccgatcccacatcaaccctacaggaaccgtcctcttgcagctggagaatacgatgcagacttcactgaaggacctcctg

SEQ ID NO: 830 - protein, 398 aa, Artificial Sequence
  variant of human alpha-galactosidase A
LDNGLARTPPMGWLHWERFMCNLDCQEEPDSCISEKLFEEMAERMVTDGWKDAGYEYLCIDDCWMAPQRDSEGRLQADPQRFPHGIRQLANHVHSKGLKLGIYADVGNKTCAGFPGSFGYYDIDAQTFADWGVDLLKFDGCYCDSLENLADGYKHMSLALNKTGRPIVYSCEWPLYMWPFQKPNYTEIRQYCNHWRNFADIDDSWASIKSILDWTSRNQERIVDVAGPGGWNDPDMLVIGNFGLSWDQQVTQMALWAIMAGPLFMSNDLRAISPQAKALLQDKDVIAINQDPLGKQGYQLRKGDNFEVWERPLSGDAWAVAIINRQEIGGPRGYTIPVASLGKGVACNPACFITQLLPVKRKLGFYDATSRLRSHINPTGTVLLQLENTMQTSLKDLL

SEQ ID NO: 831 - DNA, 1194 bp, Artificial Sequence
  variant of human alpha-galactosidase A
ctggataatggattggctagaacacctcctatggggtggcttcactgggagaggttcatgtgcaacctggactgtcaggaagaaccagacagctgcatctccgagaagctctttgaggaaatggccgaacgaatggtgactgacggctggaaagatgcaggttacgagtatctgtgtattgacgattgctggatggccccacaacgggattctgagggaagacttcaggctgatccgcagcgcttccctcatggcataaggcagctggcaaaccacgtccacagtaaggggctcaaattgggaatctacgcggacgtgggcaataagacctgtgccggttttccgggatcattcgggtattatgacattgacgcccaaacgtttgctgattggggcgttgacctgctgaaattcgatggttgctactgtgacagcctcgaaaacctggcagacggctacaagcatatgtctctcgccctgaataaaaccggtcggccaatcgtatattcctgcgagtggcctctttacatgtggccatttcagaaaccgaactacacagaaattcgccagtattgcaatcattggaggaacttcgctgatatcgatgactcatgggcctccataaagagcatcttggactggaccagtcggaatcaggagcgaattgtggatgtcgcaggccctggaggatggaacgatccagacatgctggtgatcggcaattttggcctctcttgggaccagcaggttacccaaatggctctgtgggcaattatggccggtcctcttttcatgagcaacgatctgcgcgcgatctcaccacaggcaaaggccctgctccaagacaaagatgtgatagccatcaatcaggacccgttgggaaagcagggctaccagctgagaaaaggcgacaactttgaggtctgggaaaggcctttgagtggagatgcgtgggctgtggccattattaatcggcaagagatcggaggtccacgcggttatacaattcctgtagcatctcttggcaagggcgttgcctgtaacccagcttgcttcatcactcagcttctgccggtgaagagaaaactgggtttctacctggctaccagcaggctccgatcccacatcaaccctacaggaaccgtcctcttgcagctggagaatacgatgcagacttcactgaaggacctcctg

SEQ ID NO: 832 - protein, 398 aa, Artificial Sequence
  variant of human alpha-galactosidase A
LDNGLARTPPMGWLHWERFMCNLDCQEEPDSCISEKLFEEMAERMVTDGWKDAGYEYLCIDDCWMAPQRDSEGRLQADPQRFPHGIRQLANHVHSKGLKLGIYADVGNKTCAGFPGSFGYYDIDAQTFADWGVDLLKFDGCYCDSLENLADGYKHMSLALNKTGRPIVYSCEWPLYMWPFQKPNYTEIRQYCNHWRNFADIDDSWASIKSILDWTSRNQERIVDVAGPGGWNDPDMLVIGNFGLSWDQQVTQMALWAIMAGPLFMSNDLRAISPQAKALLQDKDVIAINQDPLGKQGYQLRKGDNFEVWERPLSGDAWAVAIINRQEIGGPRGYTIPVASLGKGVACNPACFITQLLPVKRKLGFYLATSRLRSHINPTGTVLLQLENTMQTSLKDLL

SEQ ID NO: 833 - DNA, 1194 bp, Artificial Sequence
  variant of human alpha-galactosidase A
ctggataatggattggctagaacacctcctatggggtggcttcactgggagaggttcatgtgcaacctggactgtcaggaagaaccagacagctgcatctccgagaagctctttgaggaaatggccgaacgaatggtgactgacggctggaaagatgcaggttacgagtatctgtgtattgacgattgctggatggccccacaacgggattctgagggaagacttcaggctgatccgcagcgcttccctcatggcataaggcagctggcaaaccacgtccacagtaaggggctcaaattgggaatctacgcggacgtgggcaataagacctgtgccggttttccgggatcattcgggtattatgacattgacgcccaaacgtttgctgattggggcgttgacctgctgaaattcgatggttgctactgtgacagcctcgaaaacctggcagacggctacaagcatatgtctctcgccctgaataaaaccggtcggccaatcgtatattcctgcgagtggcctctttacatgtggccatttcagaaaccgaactacacagaaattcgccagtattgcaatcattggaggaacttcgctgatatcgatgactcatgggcctccataaagagcatcttggactggaccagtcggaatcaggagcgaattgtggatgtcgcaggccctggaggatggaacgatccagacatgctggtgatcggcaattttggcctctcttgggaccagcaggttacccaaatggctctgtgggcaattatggccggtcctcttttcatgagcaacgatctgcgcgcgatctcaccacaggcaaaggccctgctccaagacaaagatgtgatagccatcaatcaggacccgttgggaaagcagggctaccagctgagaaaaggcgacaactttgaggtctgggaaaggcctttgagtggagatgcgtgggctgtggccattattaatcggcaagagatcggaggtccacgcggttatacaattcctgtagcatctcttggcaagggcgttgcctgtaacccagcttgcttcatcactcagcttctgccggtgaagagaaaactgggtttctacatggctaccagcaggctccgatcccacatcaaccctacaggaaccgtcctcttgcagctggagaatacgatgcagacttcactgaaggacctcctg

SEQ ID NO: 834 - protein, 398 aa, Artificial Sequence
  variant of human alpha-galactosidase A
LDNGLARTPPMGWLHWERFMCNLDCQEEPDSCISEKLFEEMAERMVTDGWKDAGYEYLCIDDCWMAPQRDSEGRLQADPQRFPHGIRQLANHVHSKGLKLGIYADVGNKTCAGFPGSFGYYDIDAQTFADWGVDLLKFDGCYCDSLENLADGYKHMSLALNKTGRPIVYSCEWPLYMWPFQKPNYTEIRQYCNHWRNFADIDDSWASIKSILDWTSRNQERIVDVAGPGGWNDPDMLVIGNFGLSWDQQVTQMALWAIMAGPLFMSNDLRAISPQAKALLQDKDVIAINQDPLGKQGYQLRKGDNFEVWERPLSGDAWAVAIINRQEIGGPRGYTIPVASLGKGVACNPACFITQLLPVKRKLGFYMATSRLRSHINPTGTVLLQLENTMQTSLKDLL

SEQ ID NO: 835 - DNA, 1194 bp, Artificial Sequence
  variant of human alpha-galactosidase A
ctggataatggattggctagaacacctcctatggggtggcttcactgggagaggttcatgtgcaacctggattgtcaggaagaaccagacagctgcatctccgagaagctctttgaggaaatggccgaacgaatggtgactgacggctggaaagatgcaggttacgagtatctgtgcattgacgattgctggatggccccacaacgggattctgagggaagacttcaggctgatccgcagcgcttccctcatggcataaggcagctggcaaaccacgtccacagtaaggggctcaaattgggaatctacgcggacgtgggcaataagacctgtgccggttttccgggatcattcgggtattatgacattgacgcccaaacgtttgctgattggggcgttgacctgctgaaattcgatggttgctactgtgacagcctcgaaaacctggcagacggctacaagcatatgtctctcgccctgaataaaaccggtcggccaatcgtatattcctgcgagtggcctctttacatgtggccatttcagaaaccgaactacacagaaattcgccagtattgcaatcattggaggaacttcgctgatatcgatgactcatgggcctccataaagagcatcttggactggaccagtcggaatcaggagcgaattgtggatgtcgcaggccctggaggatggaacgatccagacatgctggtgatcggcaattttggcctctcttgggaccagcaggttacccaaatggctctgtgggcaattatggccggtcctcttttcatgagcaacgatctgcgcgcaatctcaccacaggcaaaggccctgctccaagacaaagatgtgatagccatcaatcaggacccgttgggaaagcagggctaccagctgagaaaaggcgacaactttgaggtctgggaaaggcctttgagtggagatgcgtgggctgtggccattattaatcggcaagagatcggaggtccacgcgggtatacaattcctgtagcatctcttggcaagggcgttgcctgtaacccagcttgcttcatcactcagcttctgccggtgaagagaaaactgggtttctacgaagctaccagcaggctccgatcccacatcaaccctacaggaaccgtcctcttgcagctgaataatacgatgaacacttcactgaaggacctcctg

SEQ ID NO: 836 - protein, 398 aa, Artificial Sequence
  variant of human alpha-galactosidase A
LDNGLARTPPMGWLHWERFMCNLDCQEEPDSCISEKLFEEMAERMVTDGWKDAGYEYLCIDDCWMAPQRDSEGRLQADPQRFPHGIRQLANHVHSKGLKLGIYADVGNKTCAGFPGSFGYYDIDAQTFADWGVDLLKFDGCYCDSLENLADGYKHMSLALNKTGRPIVYSCEWPLYMWPFQKPNYTEIRQYCNHWRNFADIDDSWASIKSILDWTSRNQERIVDVAGPGGWNDPDMLVIGNFGLSWDQQVTQMALWAIMAGPLFMSNDLRAISPQAKALLQDKDVIAINQDPLGKQGYQLRKGDNFEVWERPLSGDAWAVAIINRQEIGGPRGYTIPVASLGKGVACNPACFITQLLPVKRKLGFYEATSRLRSHINPTGTVLLQLNNTMNTSLKDLL

SEQ ID NO: 837 - DNA, 1194 bp, Artificial Sequence
  variant of human alpha-galactosidase A
ctggataatggattggctagaacacctcctatggggtggcttcactgggagaggttcatgtgcaacctggactgtcaggaagaaccagacagctgcatctccgagaagctctttgagcagatggccgaacgaatggtgactgacggctggaaagatgcaggttacgagtatctgtgtattgacgattgctggatggccccacaacgggattctgagggaagacttcaggctgatccgcagcgcttccctcatggcataaggcagctggcaaaccacgtccacagtaaggggctcaaattgggaatctacgcggacgtgggcaataagacctgtgccggttttccgggatcattcgggtattatgacattgacgcccaaacgtttgctgattggggcgttgacctgctgaaattcgatggttgctactgtgacagcctcgaaaacctggcagacggctacaagcatatgtctctcgccctgaataaaaccggtcggccaatcgtatattcctgcgagtggcctctttacatgtggccatttcagaaaccgaactacacagaaattcgccagtattgcaatcattggaggaacttcgctgatatcgatgactcatgggcctccataaagagcatcttggactggaccagtcggaatcaggagcgaattgtggatgtcgcaggccctggaggatggaacgatccagacatgctggtgatcggcaattttggcctctcttgggaccagcaggttacccaaatggctctgtgggcaattatggccggtcctcttttcatgagcaacgatctgcgcgcgatctcaccacaggcaaaggccctgctccaagacaaagatgtgatagccatcaatcaggacccgttgggaaagcagggctaccagctgagaaaaggcgacaactttgaggtctgggaaaggcctttgagtggagatgcgtgggctgtggccattattaatcggcaagagatcggaggtccacgcggttatacaattcctgtagcatctcttggcaagggcgttgcctgtaacccagcttgcttcatcactcagcttctgccggtgaagagaaaactgggtttctacgaagctaccagcaggctccgatcccacatcaaccctacaggaaccgtcctcttgcagctggagaatacgatgcagacttcactgaaggacctcctg

SEQ ID NO: 838 - protein, 398 aa, Artificial Sequence
  variant of human alpha-galactosidase A
LDNGLARTPPMGWLHWERFMCNLDCQEEPDSCISEKLFEQMAERMVTDGWKDAGYEYLCIDDCWMAPQRDSEGRLQADPQRFPHGIRQLANHVHSKGLKLGIYADVGNKTCAGFPGSFGYYDIDAQTFADWGVDLLKFDGCYCDSLENLADGYKHMSLALNKTGRPIVYSCEWPLYMWPFQKPNYTEIRQYCNHWRNFADIDDSWASIKSILDWTSRNQERIVDVAGPGGWNDPDMLVIGNFGLSWDQQVTQMALWAIMAGPLFMSNDLRAISPQAKALLQDKDVIAINQDPLGKQGYQLRKGDNFEVWERPLSGDAWAVAIINRQEIGGPRGYTIPVASLGKGVACNPACFITQLLPVKRKLGFYEATSRLRSHINPTGTVLLQLENTMQTSLKDLL

SEQ ID NO: 839 - DNA, 1194 bp, Artificial Sequence
  variant of human alpha-galactosidase A
ctggataatggattggctagaacacctcctatggggtggcttcactgggagaggttcatgtgcaacctggactgtcaggaagaaccagacagctgcatctccgagaagctctttgaggaaatggccgaacgaatggtgactgacggctggaaagatgcaggttacgagtatctgtgtattgacgattgctggatggccccacaacgggattctgagggaagacttcaggctgatccgcagcgcttccctcatggcataaggcagctggcaaaccacgtccacagtaaggggctcaaattgggaatctacgcggacgtgggcaataagacctgtgccggttttccgggatcattcgggtattatgacattgacgcccaaacgtttgctgattggggcgttgacctgctgaaattcgatggttgctactgtgacagcctcgaaaacctggcagacggctacaagcatatgtctctcgccctgaataaaaccgagcggccaatcgtatattcctgcgagtggcctctttacatgtggccatttcagaaaccgaactacacagaaattcgccagtattgcaatcattggaggaacttcgctgatatcgatgactcatgggcctccataaagagcatcttggactggaccagtcggaatcaggagcgaattgtggatgtcgcaggccctggaggatggaacgatccagacatgctggtgatcggcaattttggcctctcttgggaccagcaggttacccaaatggctctgtgggcaattatggccggtcctcttttcatgagcaacgatctgcgcgcgatctcaccacaggcaaaggccctgctccaagacaaagatgtgatagccatcaatcaggacccgttgggaaagcagggctaccagctgagaaaaggcgacaactttgaggtctgggaaaggcctttgagtggagatgcgtgggctgtggccattattaatcggcaagagatcggaggtccacgcggttatacaattcctgtagcatctcttggcaagggcgttgcctgtaacccagcttgcttcatcactcagcttctgccggtgaagagaaaactgggtttctacgaagctaccagcaggctccgatcccacatcaaccctacaggaaccgtcctcttgcagctggagaatacgatgcagacttcactgaaggacctcctg

SEQ ID NO: 840 - protein, 398 aa, Artificial Sequence
  variant of human alpha-galactosidase A
LDNGLARTPPMGWLHWERFMCNLDCQEEPDSCISEKLFEEMAERMVTDGWKDAGYEYLCIDDCWMAPQRDSEGRLQADPQRFPHGIRQLANHVHSKGLKLGIYADVGNKTCAGFPGSFGYYDIDAQTFADWGVDLLKFDGCYCDSLENLADGYKHMSLALNKTERPIVYSCEWPLYMWPFQKPNYTEIRQYCNHWRNFADIDDSWASIKSILDWTSRNQERIVDVAGPGGWNDPDMLVIGNFGLSWDQQVTQMALWAIMAGPLFMSNDLRAISPQAKALLQDKDVIAINQDPLGKQGYQLRKGDNFEVWERPLSGDAWAVAIINRQEIGGPRGYTIPVASLGKGVACNPACFITQLLPVKRKLGFYEATSRLRSHINPTGTVLLQLENTMQTSLKDLL

SEQ ID NO: 841 - DNA, 1194 bp, Artificial Sequence
  variant of human alpha-galactosidase A
ctggataatggattggctagaacacctcctatggggtggcttcactgggagaggttcatgtgcaacctggactgtcaggaagaaccagacagctgcatctccgagaagctctttgaggaaatggccgaacgaatggtgactgacggctggaaagatgcaggttacgagtatctgtgtattgacgattgctggatggccccacaacgggattctgagggaagacttcaggctgatccgcagcgcttccctcatggcataaggcagctggcaaaccacgtccacagtaaggggctcaaattgggaatctacgcggacgtgggcaataagacctgtgccggttttccgggatcattcgggtattatgacattgacgcccaaacgtttgctgattggggcgttgacctgctgaaattcgatggttgctactgtgacagcctcgaaaacctggcagacggctacaagcatatgtctctcgccctgaataaaaccggtcggccaatcgtatattcctgcgagtggcctctttacatgtggccatttcagaaaccgaactacacagaaattcgccagtattgcaatcattggaggaacttcgctgatatcgatgactcatgggcctccataaagagcatcttggactggaccagtcggaatcaggagcgaattgtggatgtcgcaggccctggaggatggaacgatccagacatgctggtgatcggcaattttggcctctcttgggaccagcaggttacccaaatggctctgtgggcaattatggccggtcctcttttcatgagcaacgatctgcgcgcgatctcaccacaggcaaaggccctgctccaagacaaagatgtgatagccatcaatcaggacccgttgggaaagcagggctaccagctgagaaaagctgacaactttgaggtctgggaaaggcctttgagtggagatgcgtgggctgtggccattattaatcggcaagagatcggaggtccacgcggttatacaattcctgtagcatctcttggcaagggcgttgcctgtaacccagcttgcttcatcactcagcttctgccggtgaagagaaaactgggtttctacgaagctaccagcaggctccgatcccacatcaaccctacaggaaccgtcctcttgcagctggagaatacgatgcagacttcactgaaggacctcctg

SEQ ID NO: 842 - protein, 398 aa, Artificial Sequence
  variant of human alpha-galactosidase A
LDNGLARTPPMGWLHWERFMCNLDCQEEPDSCISEKLFEEMAERMVTDGWKDAGYEYLCIDDCWMAPQRDSEGRLQADPQRFPHGIRQLANHVHSKGLKLGIYADVGNKTCAGFPGSFGYYDIDAQTFADWGVDLLKFDGCYCDSLENLADGYKHMSLALNKTGRPIVYSCEWPLYMWPFQKPNYTEIRQYCNHWRNFADIDDSWASIKSILDWTSRNQERIVDVAGPGGWNDPDMLVIGNFGLSWDQQVTQMALWAIMAGPLFMSNDLRAISPQAKALLQDKDVIAINQDPLGKQGYQLRKADNFEVWERPLSGDAWAVAIINRQEIGGPRGYTIPVASLGKGVACNPACFITQLLPVKRKLGFYEATSRLRSHINPTGTVLLQLENTMQTSLKDLL

SEQ ID NO: 843 - DNA, 1194 bp, Artificial Sequence
  variant of human alpha-galactosidase A
ctggataatggattggctagaacacctcctatggggtggcttcactgggagaggttcatgtgcaacctggactgtcaggaagaaccagacagctgcatctccgagaagctctttgaggaaatggccgaacgaatggtgactgacggctggaaagatgcaggttacgagtatctgtgtattgacgattgctggatggccccacaacgggattctgagggaagacttcaggctgatccgcagcgcttccctcatggcataaggcagctggcaaaccacgtccacagtaaggggctcaaattgggaatctacgcggacgtgggcaataagacctgtgccggttttccgggatcattcgggtattatgacattgacgcccaaacgtttgctgattggggcgttgacctgctgaaattcgatggttgctactgtgacagcctcgaaaacctggcagacggctacaagcatatgtctctcgccctgaataaaaccggtcggccaatcgtatattcctgcgagtggcctctttacatgtggccatttcagaaaccgaactacacagaaattcgccagtattgcaatcattggaggaacttcgctgatatcgatgactcatgggcctccataaagagcatcttggactggaccagtcggaatcaggagcgaattgtggatgtcgcaggccctggaggatggaacgatccagacatgctggtgatcggcaattttggcctctcttgggaccagcaggttacccaaatggctctgtgggcaattatggccggtcctcttttcatgagcaacgatctgcgcgcgatctcaccacaggcaaaggccctgctccaagacaaagatgtgatagccatcaatcaggacccgttgggaaagcagggctaccagctgagaaaatgtgacaactttgaggtctgggaaaggcctttgagtggagatgcgtgggctgtggccattattaatcggcaagagatcggaggtccacgcggttatacaattcctgtagcatctcttggcaagggcgttgcctgtaacccagcttgcttcatcactcagcttctgccggtgaagagaaaactgggtttctacgaagctaccagcaggctccgatcccacatcaaccctacaggaaccgtcctcttgcagctggagaatacgatgcagacttcactgaaggacctcctg

SEQ ID NO: 844 - protein, 398 aa, Artificial Sequence
  variant of human alpha-galactosidase A
LDNGLARTPPMGWLHWERFMCNLDCQEEPDSCISEKLFEEMAERMVTDGWKDAGYEYLCIDDCWMAPQRDSEGRLQADPQRFPHGIRQLANHVHSKGLKLGIYADVGNKTCAGFPGSFGYYDIDAQTFADWGVDLLKFDGCYCDSLENLADGYKHMSLALNKTGRPIVYSCEWPLYMWPFQKPNYTEIRQYCNHWRNFADIDDSWASIKSILDWTSRNQERIVDVAGPGGWNDPDMLVIGNFGLSWDQQVTQMALWAIMAGPLFMSNDLRAISPQAKALLQDKDVIAINQDPLGKQGYQLRKCDNFEVWERPLSGDAWAVAIINRQEIGGPRGYTIPVASLGKGVACNPACFITQLLPVKRKLGFYEATSRLRSHINPTGTVLLQLENTMQTSLKDLL

SEQ ID NO: 845 - DNA, 1194 bp, Artificial Sequence
  variant of human alpha-galactosidase A
ctggataatggattggctagaacacctcctatggggtggcttcactgggagaggttcatgtgcaacctggactgtcaggaagaaccagacagctgcatctccgagaagctctttgaggaaatggccgaacgaatggtgactgacggctggaaagatgcaggttacgagtatctgtgtattgacgattgctggatggccccacaacgggattctgagggaagacttcaggctgatccgcagcgcttccctcatggcataaggcagctggcaaaccacgtccacagtaaggggctcaaattgggaatctacgcggacgtgggcaataagacctgtgccggttttccgggatcattcgggtattatgacattgacgcccaaacgtttgctgattggggcgttgacctgctgaaattcgatggttgctactgtgacagcctcgaaaacctggcagacggctacaagcatatgtctctcgccctgaataaaaccggtcggccaatcgtatattcctgcgagtggcctctttacatgtggccatttcagaaaccgaactacacagaaattcgccagtattgcaatcattggaggaacttcgctgatatcgatgactcatgggcctccataaagagcatcttggactggaccagtcggaatcaggagcgaattgtggatgtcgcaggccctggaggatggaacgatccagacatgctggtgatcggcaattttggcctctcttgggaccagcaggttacccaaatggctctgtgggcaattatggccggtcctcttttcatgagcaacgatctgcgcgcgatctcaccacaggcaaaggccctgctccaagacaaagatgtgatagccatcaatcaggacccgttgggaaagcagggctaccagctgagaaaatgggacaactttgaggtctgggaaaggcctttgagtggagatgcgtgggctgtggccattattaatcggcaagagatcggaggtccacgcggttatacaattcctgtagcatctcttggcaagggcgttgcctgtaacccagcttgcttcatcactcagcttctgccggtgaagagaaaactgggtttctacgaagctaccagcaggctccgatcccacatcaaccctacaggaaccgtcctcttgcagctggagaatacgatgcagacttcactgaaggacctcctg

SEQ ID NO: 846 - protein, 398 aa, Artificial Sequence
  variant of human alpha-galactosidase A
LDNGLARTPPMGWLHWERFMCNLDCQEEPDSCISEKLFEEMAERMVTDGWKDAGYEYLCIDDCWMAPQRDSEGRLQADPQRFPHGIRQLANHVHSKGLKLGIYADVGNKTCAGFPGSFGYYDIDAQTFADWGVDLLKFDGCYCDSLENLADGYKHMSLALNKTGRPIVYSCEWPLYMWPFQKPNYTEIRQYCNHWRNFADIDDSWASIKSILDWTSRNQERIVDVAGPGGWNDPDMLVIGNFGLSWDQQVTQMALWAIMAGPLFMSNDLRAISPQAKALLQDKDVIAINQDPLGKQGYQLRKWDNFEVWERPLSGDAWAVAIINRQEIGGPRGYTIPVASLGKGVACNPACFITQLLPVKRKLGFYEATSRLRSHINPTGTVLLQLENTMQTSLKDLL

SEQ ID NO: 847 - DNA, 1194 bp, Artificial Sequence
  variant of human alpha-galactosidase A
ctggataatggattggctagaacacctcctatggggtggcttcactgggagaggttcatgtgcaacctggattgtcaggaagaaccagacagctgcatctccgagaagctctttgaggaaatggccgaacgaatggtgactgacggctggaaagatgcaggttacgagtatctgtgtattgacgattgctggatggccccacaacgggattctgagggaagacttcaggctgatccgcagcgcttccctcatggcataaggcagctggcaaaccacgtccacagtaaggggctcaaattgggaatctacgcggacgtgggcaataagacctgtgccggttttccgggatcattcgggtattatgacattgacgcccaaacgtttgctgattggggcgttgacctgctgaaattcgatggttgctactgtgacagcctcgaaaacctggcagacggctacaagcatatgtctctcgccctgaataaaaccggtcggccaatcgtatattcctgcgagtggcctctttacatgtggccatttcagaaaccgaactacacagaaattcgccagtattgcaatcattggaggaacttcgctgatatcgatgactcatgggcctccataaagagcatcttggactggaccagtcggaatcaggagcgaattgtggatgtcgcaggccctggaggatggaacgatccagacatgctggtgatcggcaattttggcctctcttgggaccagcaggttacccaaatggctctgtgggcaattatggccggtcctcttttcatgagcaacgatctgcgcgcaatctcaccacaggcaaaggccctgctccaagacaaagatgtgatagccatcaatcaggacccgttgggaaagcagggctaccagctgagaaaaggcgacaactttgaggtctgggaaaggcctttgagtggagatgcgtgggctgtggccattattaatcggcaagagatcggaggtccacgcaattatacaattcctgtagcatctcttggcaagggcgttgcctgtaacccagcttgcaatatcactcagcttctgccggtgaagagaaaactgggtttctacgaagctaccagcaggctccgatcccacatcaaccctacaggaaccgtcctcttgcagctggagaatacgatgcagacttcactgaaggacctcctg

SEQ ID NO: 848 - protein, 398 aa, Artificial Sequence
  variant of human alpha-galactosidase A
LDNGLARTPPMGWLHWERFMCNLDCQEEPDSCISEKLFEEMAERMVTDGWKDAGYEYLCIDDCWMAPQRDSEGRLQADPQRFPHGIRQLANHVHSKGLKLGIYADVGNKTCAGFPGSFGYYDIDAQTFADWGVDLLKFDGCYCDSLENLADGYKHMSLALNKTGRPIVYSCEWPLYMWPFQKPNYTEIRQYCNHWRNFADIDDSWASIKSILDWTSRNQERIVDVAGPGGWNDPDMLVIGNFGLSWDQQVTQMALWAIMAGPLFMSNDLRAISPQAKALLQDKDVIAINQDPLGKQGYQLRKGDNFEVWERPLSGDAWAVAIINRQEIGGPRNYTIPVASLGKGVACNPACNITQLLPVKRKLGFYEATSRLRSHINPTGTVLLQLENTMQTSLKDLL

SEQ ID NO: 849 - DNA, 1194 bp, Artificial Sequence
  variant of human alpha-galactosidase A
ctggataatggattggctagaacacctcctatggggtggcttcactgggagaggttcatgtgcaacctggactgtcaggaagaaccagacagctgcatctccgagaagctctttgaggaaatggccgaacgaatggtgactgacggctggaaagatgcaggttacgagtatctgtgtattgacgattgctggatggccccacaacgggattctgagggaagacttcaggctgatccgcagcgcttccctcatggcataaggcagctggcaaaccacgtccacagtaaggggctcaaattgggaatctacgcggacgtgggcaataagacctgtgccggttttccgggatcattcgggtattatgacattgacgcccaaacgtttgctgattggggcgttgacctgctgaaattcgatggttgctactgtgacagcctcgaaaacctggcagacggctacaagcatatgtctctcgccctgaataaaaccggtcggccaatcgtatattcctgcgagtggcctctttacatgtggccatttcagaaaccgaactacacagaaattcgccagtattgcaatcattggaggaacttcgctgatatcgatgactcatgggcctccataaagagcatcttggactggaccagtcggaatcaggagcgaattgtggatgtcgcaggccctggaggatggaacgatccagacatgctggtgatcggcaattttggcctctcttgggaccagcaggttacccaaatggctctgtgggcaattatggccggtcctcttttcatgagcaacgatctgcgcgcaatctcaccacaggcaaaggccctgctccaagacaaagatgtgatagccatcaatcaggacccgttgggaaagcagggctaccagctgagaaaaggcgacaactttgaggtctgggaaaggcctttgagtggagatgcgtgggctgtggccattattaatcggcaagagatcggaggtccacgcaattatacaattcctgtagcatctcttggcaagggcgttgcctgtaacccagcttgcttcatcactcagcttctgccggtgaagagaaaactgggtttctacgaagctaccagcaggctccgatcccacatcaaccctacaggaaccgtcctcttgcagctggaaaatacgaataacacttcactgaaggacctcctg

SEQ ID NO: 850 - protein, 398 aa, Artificial Sequence
  variant of human alpha-galactosidase A
LDNGLARTPPMGWLHWERFMCNLDCQEEPDSCISEKLFEEMAERMVTDGWKDAGYEYLCIDDCWMAPQRDSEGRLQADPQRFPHGIRQLANHVHSKGLKLGIYADVGNKTCAGFPGSFGYYDIDAQTFADWGVDLLKFDGCYCDSLENLADGYKHMSLALNKTGRPIVYSCEWPLYMWPFQKPNYTEIRQYCNHWRNFADIDDSWASIKSILDWTSRNQERIVDVAGPGGWNDPDMLVIGNFGLSWDQQVTQMALWAIMAGPLFMSNDLRAISPQAKALLQDKDVIAINQDPLGKQGYQLRKGDNFEVWERPLSGDAWAVAIINRQEIGGPRNYTIPVASLGKGVACNPACFITQLLPVKRKLGFYEATSRLRSHINPTGTVLLQLENTNNTSLKDLL

SEQ ID NO: 851 - DNA, 1194 bp, Artificial Sequence
  variant of human alpha-galactosidase A
ctggataatggattggctagaacacctcctatggggtggcttcactgggagaggttcatgtgcaacctggattgtcaggaagaaccagacagctgcatctccgagaagctctttgaggaaatggccgaacgaatggtgactgacggctggaaagatgcaggttacgagtatctgtgtattgacgattgctggatggccccacaacgggattctgagggaagacttcaggctgatccgcagcgcttccctcatggcataaggcagctggcaaaccacgtccacagtaaggggctcaaattgggaatctacgcggacgtgggcaataagacctgtgccggttttccgggatcattcgggtattatgacattgacgcccaaacgtttgctgattggggcgttgacctgctgaaattcgatggttgctactgtgacagcctcgaaaacctggcagacggctacaagcatatgtctctcgccctgaataaaaccggtcggccaatcgtatattcctgcgagtggcctctttacatgtggccatttcagaaaccgaactacacagaaattcgccagtattgcaatcattggaggaacttcgctgatatcgatgactcatgggcctccataaagagcatcttggactggaccagtcggaatcaggagcgaattgtggatgtcgcaggccctggaggatggaacgatccagacatgctggtgatcggcaattttggcctctcttgggaccagcaggttacccaaatggctctgtgggcaattatggccggtcctcttttcatgagcaacgatctgcgcgcaatctcaccacaggcaaaggccctgctccaagacaaagatgtgatagccatcaatcaggacccgttgggaaagcagggctaccagctgagaaaaggcgacaactttgaggtctgggaaaggcctttgagtggagatgcgtgggctgtggccattattaatcggcaagagatcggaggtccacgcaattatacaattcctgtagcatctcttggcaagggcgttgcctgtaacccagcttgctttatcactcagcttctgccggtgaagagaaaactgggtttctacgaagctaccagcaggctccgatcccacatcaaccctacaggaaccgtcctcttgcagctggaaaatacgagtaacacttcactgaaggacctcctg

SEQ ID NO: 852 - protein, 398 aa, Artificial Sequence
  variant of human alpha-galactosidase A
LDNGLARTPPMGWLHWERFMCNLDCQEEPDSCISEKLFEEMAERMVTDGWKDAGYEYLCIDDCWMAPQRDSEGRLQADPQRFPHGIRQLANHVHSKGLKLGIYADVGNKTCAGFPGSFGYYDIDAQTFADWGVDLLKFDGCYCDSLENLADGYKHMSLALNKTGRPIVYSCEWPLYMWPFQKPNYTEIRQYCNHWRNFADIDDSWASIKSILDWTSRNQERIVDVAGPGGWNDPDMLVIGNFGLSWDQQVTQMALWAIMAGPLFMSNDLRAISPQAKALLQDKDVIAINQDPLGKQGYQLRKGDNFEVWERPLSGDAWAVAIINRQEIGGPRNYTIPVASLGKGVACNPACFITQLLPVKRKLGFYEATSRLRSHINPTGTVLLQLENTSNTSLKDLL

SEQ ID NO: 853 - DNA, 1194 bp, Artificial Sequence
  variant of human alpha-galactosidase A
ctggataatggattggctagaacacctcctatggggtggcttcactgggagaggttcatgtgcaacctggattgtcaggaagaaccagacagctgcatctccgagaagctctttgaggaaatggccgaacgaatggtgactgacggctggaaagatgcaggttacgagtatctgtgcattgacgattgctggatggccccacaacgggattctgagggaagacttcaggctgatccgcagcgcttccctcatggcataaggcagctggcaaaccacgtccacagtaaggggctcaaattgggaatctacgcggacgtgggcaataagacctgtgccggttttccgggatcattcgggtattatgacattgacgcccaaacgtttgctgattggggcgttgacctgctgaaattcgatggttgctactgtgacagcctcgaaaacctggcagacggctacaagcatatgtctctcgccctgaataaaaccggtcggccaatcgtatattcctgcgagtggcctctttacatgtggccatttcagaaaccgaactacacagaaattcgccagtattgcaatcattggaggaacttcgctgatatcgatgactcatgggcctccataaagagcatcttggactggaccagtcggaatcaggagcgaattgtggatgtcgcaggccctggaggatggaacgatccagacatgctggtgatcggcaattttggcctctcttgggaccagcaggttacccaaatggctctgtgggcaattatggccggtcctcttttcatgagcaacgatctgcgcgcaatctcaccacaggcaaaggccctgctccaagacaaagatgtgatagccatcaatcaggacccgttgggaaagcagggctaccagctgagaaaaggcgacaactttgaggtctgggaaaggcctttgagtggagatgcgtgggctgtggccattattaatcggcaagagatcggaggtccacgcaattatacaattcctgtagcatctcttggcaagggcgttgcctgtaacccagcttgctttatcactcagcttctgccggtgaagagaaaactgggtttctacgaagctaccagcaggctccgatcccacatcaaccctacaggaaccgtcctcttgcagctggaaaatacgatgaacacttcactgaaggacctcctg

SEQ ID NO: 854 - protein, 398 aa, Artificial Sequence
  variant of human alpha-galactosidase A
LDNGLARTPPMGWLHWERFMCNLDCQEEPDSCISEKLFEEMAERMVTDGWKDAGYEYLCIDDCWMAPQRDSEGRLQADPQRFPHGIRQLANHVHSKGLKLGIYADVGNKTCAGFPGSFGYYDIDAQTFADWGVDLLKFDGCYCDSLENLADGYKHMSLALNKTGRPIVYSCEWPLYMWPFQKPNYTEIRQYCNHWRNFADIDDSWASIKSILDWTSRNQERIVDVAGPGGWNDPDMLVIGNFGLSWDQQVTQMALWAIMAGPLFMSNDLRAISPQAKALLQDKDVIAINQDPLGKQGYQLRKGDNFEVWERPLSGDAWAVAIINRQEIGGPRNYTIPVASLGKGVACNPACFITQLLPVKRKLGFYEATSRLRSHINPTGTVLLQLENTMNTSLKDLL

SEQ ID NO: 855 - DNA, 1194 bp, Artificial Sequence
  variant of human alpha-galactosidase A
ctggataatttgttggctagaacacctcctatggggtggcttcactgggagaggttcatgtgcaacctggactgtcaggaagaaccagacagctgcatctccgagaagctctttgaggaaatggccgaacgaatggtgactgacggctggaaagatgcaggttacgagtatctgtgtattgacgattgctggatggccccacaacgggattctgagggaagacttcaggctgatccgcagcgcttccctcatggcataaggcagctggcaaaccacgtccacagtaaggggctcaaattgggaatctacgcggacgtgggcaataagacctgtgccggttttccgggatcattcgggtattatgacattgacgcccaaacgtttgctgattggggcgttgacctgctgaaattcgatggttgctactgtgacagcctcgaaaacctggcagacggctacaagcatatgtctctcgccctgaataaaaccggtcggccaatcgtatattcctgcgagtggcctctttacatgtggccatttcagaaaccgaactacacagaaattcgccagtattgcaatcattggaggaacttcgctgatatcgatgactcatgggcctccataaagagcatcttggactggaccagtcggaatcaggagcgaattgtggatgtcgcaggccctggaggatggaacgatccagacatgctggtgatcggcaattttggcctctcttgggaccagcaggttacccaaatggctctgtgggcaattatggccggtcctcttttcatgagcaacgatctgcgcgcgatctcaccacaggcaaaggccctgctccaagacaaagatgtgatagccatcaatcaggacccgttgggaaagcagggctaccagctgagaaaaggcgacaactttgaggtctgggaaaggcctttgagtggagatgcgtgggctgtggccattattaatcggcaagagatcggaggtccacgcggttatacaattcctgtagcatctcttggcaagggcgttgcctgtaacccagcttgcttcatcactcagcttctgccggtgaagagaaaactgggtttctacgaagctaccagcaggctccgatcccacatcaaccctacaggaaccgtcctcttgcagctggagaatacgatgcagacttcactgaaggacctcctg

SEQ ID NO: 856 - protein, 398 aa, Artificial Sequence
  variant of human alpha-galactosidase A
LDNLLARTPPMGWLHWERFMCNLDCQEEPDSCISEKLFEEMAERMVTDGWKDAGYEYLCIDDCWMAPQRDSEGRLQADPQRFPHGIRQLANHVHSKGLKLGIYADVGNKTCAGFPGSFGYYDIDAQTFADWGVDLLKFDGCYCDSLENLADGYKHMSLALNKTGRPIVYSCEWPLYMWPFQKPNYTEIRQYCNHWRNFADIDDSWASIKSILDWTSRNQERIVDVAGPGGWNDPDMLVIGNFGLSWDQQVTQMALWAIMAGPLFMSNDLRAISPQAKALLQDKDVIAINQDPLGKQGYQLRKGDNFEVWERPLSGDAWAVAIINRQEIGGPRGYTIPVASLGKGVACNPACFITQLLPVKRKLGFYEATSRLRSHINPTGTVLLQLENTMQTSLKDLL

SEQ ID NO: 857 - DNA, 1194 bp, Artificial Sequence
  variant of human alpha-galactosidase A
ctggataatggattggctagaacacctcctatggggtggcttcactgggagaggttcatgtgcaacctggactgtcaggaagaaccagacagctgcatctccgagaagctctttgaggaaatggccgaacgaatggtgactgacggctggaaagatgcaggttacgagtatctgtgtattgacgattgctggatggccccacaacgggattctgaggctagacttcaggctgatccgcagcgcttccctcatggcataaggcagctggcaaaccacgtccacagtaaggggctcaaattgggaatctacgcggacgtgggcaataagacctgtgccggttttccgggatcattcgggtattatgacattgacgcccaaacgtttgctgattggggcgttgacctgctgaaattcgatggttgctactgtgacagcctcgaaaacctggcagacggctacaagcatatgtctctcgccctgaataaaaccggtcggccaatcgtatattcctgcgagtggcctctttacatgtggccatttcagaaaccgaactacacagaaattcgccagtattgcaatcattggaggaacttcgctgatatcgatgactcatgggcctccataaagagcatcttggactggaccagtcggaatcaggagcgaattgtggatgtcgcaggccctggaggatggaacgatccagacatgctggtgatcggcaattttggcctctcttgggaccagcaggttacccaaatggctctgtgggcaattatggccggtcctcttttcatgagcaacgatctgcgcgcgatctcaccacaggcaaaggccctgctccaagacaaagatgtgatagccatcaatcaggacccgttgggaaagcagggctaccagctgagaaaaggcgacaactttgaggtctgggaaaggcctttgagtggagatgcgtgggctgtggccattattaatcggcaagagatcggaggtccacgcggttatacaattcctgtagcatctcttggcaagggcgttgcctgtaacccagcttgcttcatcactcagcttctgccggtgaagagaaaactgggtttctacgaagctaccagcaggctccgatcccacatcaaccctacaggaaccgtcctcttgcagctggagaatacgatgcagacttcactgaaggacctcctg

SEQ ID NO: 858 - protein, 398 aa, Artificial Sequence
  variant of human alpha-galactosidase A
LDNGLARTPPMGWLHWERFMCNLDCQEEPDSCISEKLFEEMAERMVTDGWKDAGYEYLCIDDCWMAPQRDSEARLQADPQRFPHGIRQLANHVHSKGLKLGIYADVGNKTCAGFPGSFGYYDIDAQTFADWGVDLLKFDGCYCDSLENLADGYKHMSLALNKTGRPIVYSCEWPLYMWPFQKPNYTEIRQYCNHWRNFADIDDSWASIKSILDWTSRNQERIVDVAGPGGWNDPDMLVIGNFGLSWDQQVTQMALWAIMAGPLFMSNDLRAISPQAKALLQDKDVIAINQDPLGKQGYQLRKGDNFEVWERPLSGDAWAVAIINRQEIGGPRGYTIPVASLGKGVACNPACFITQLLPVKRKLGFYEATSRLRSHINPTGTVLLQLENTMQTSLKDLL

SEQ ID NO: 859 - DNA, 1194 bp, Artificial Sequence
  variant of human alpha-galactosidase A
ctggataatggattggctagaacacctcctatggggtggcttcactgggagaggttcatgtgcaacctggactgtcaggaagaaccagacagctgcatctccgagaagctctttgaggaaatggccgaacgaatggtgactgacggctggaaagatgcaggttacgagtatctgtgtattgacgattgctggatggccccacaacgggattctgagggaagacttcaggctgatccgcagcgcttccctcatggcataaggcagctggcaaaccacgtccacagtaaggggctcaaattgggaatctacgcggacgtgggcaataagacctgtgccggttttccgggatcattcgggtattatgacattgacgcccaaacgtttgctgattggggcgttgacctgctgaaattcgatggttgctactgtgacagcctcgaaaacctggcagacggctacaaggctatgtctctcgccctgaataaaaccggtcggccaatcgtatattcctgcgagtggcctctttacatgtggccatttcagaaaccgaactacacagaaattcgccagtattgcaatcattggaggaacttcgctgatatcgatgactcatgggcctccataaagagcatcttggactggaccagtcggaatcaggagcgaattgtggatgtcgcaggccctggaggatggaacgatccagacatgctggtgatcggcaattttggcctctcttgggaccagcaggttacccaaatggctctgtgggcaattatggccggtcctcttttcatgagcaacgatctgcgcgcgatctcaccacaggcaaaggccctgctccaagacaaagatgtgatagccatcaatcaggacccgttgggaaagcagggctaccagctgagaaaaggcgacaactttgaggtctgggaaaggcctttgagtggagatgcgtgggctgtggccattattaatcggcaagagatcggaggtccacgcggttatacaattcctgtagcatctcttggcaagggcgttgcctgtaacccagcttgcttcatcactcagcttctgccggtgaagagaaaactgggtttctacgaagctaccagcaggctccgatcccacatcaaccctacaggaaccgtcctcttgcagctggagaatacgatgcagacttcactgaaggacctcctg

SEQ ID NO: 860 - protein, 398 aa, Artificial Sequence
  variant of human alpha-galactosidase A
LDNGLARTPPMGWLHWERFMCNLDCQEEPDSCISEKLFEEMAERMVTDGWKDAGYEYLCIDDCWMAPQRDSEGRLQADPQRFPHGIRQLANHVHSKGLKLGIYADVGNKTCAGFPGSFGYYDIDAQTFADWGVDLLKFDGCYCDSLENLADGYKAMSLALNKTGRPIVYSCEWPLYMWPFQKPNYTEIRQYCNHWRNFADIDDSWASIKSILDWTSRNQERIVDVAGPGGWNDPDMLVIGNFGLSWDQQVTQMALWAIMAGPLFMSNDLRAISPQAKALLQDKDVIAINQDPLGKQGYQLRKGDNFEVWERPLSGDAWAVAIINRQEIGGPRGYTIPVASLGKGVACNPACFITQLLPVKRKLGFYEATSRLRSHINPTGTVLLQLENTMQTSLKDLL

SEQ ID NO: 861 - DNA, 1194 bp, Artificial Sequence
  variant of human alpha-galactosidase A
ctggataatggattggctagaacacctcctatggggtggcttcactgggagaggttcatgtgcaacctggactgtcaggaagaaccagacagctgcatctccgagaagctctttgaggaaatggccgaacgaatggtgactgacggctggaaagatgcaggttacgagtatctgtgtattgacgattgctggatggccccacaacgggattctgagggaagacttcaggctgatccgcagcgcttccctcatggcataaggcagctggcaaaccacgtccacagtaaggggctcaaattgggaatctacgcggacgtgggcaataagacctgtgccggttttccgggatcattcgggtattatgacattgacgcccaaacgtttgctgattggggcgttgacctgctgaaattcgatggttgctactgtgacagcctcgaaaacctggcagacggctacaaggatatgtctctcgccctgaataaaaccggtcggccaatcgtatattcctgcgagtggcctctttacatgtggccatttcagaaaccgaactacacagaaattcgccagtattgcaatcattggaggaacttcgctgatatcgatgactcatgggcctccataaagagcatcttggactggaccagtcggaatcaggagcgaattgtggatgtcgcaggccctggaggatggaacgatccagacatgctggtgatcggcaattttggcctctcttgggaccagcaggttacccaaatggctctgtgggcaattatggccggtcctcttttcatgagcaacgatctgcgcgcgatctcaccacaggcaaaggccctgctccaagacaaagatgtgatagccatcaatcaggacccgttgggaaagcagggctaccagctgagaaaaggcgacaactttgaggtctgggaaaggcctttgagtggagatgcgtgggctgtggccattattaatcggcaagagatcggaggtccacgcggttatacaattcctgtagcatctcttggcaagggcgttgcctgtaacccagcttgcttcatcactcagcttctgccggtgaagagaaaactgggtttctacgaagctaccagcaggctccgatcccacatcaaccctacaggaaccgtcctcttgcagctggagaatacgatgcagacttcactgaaggacctcctg

SEQ ID NO: 862 - protein, 398 aa, Artificial Sequence
  variant of human alpha-galactosidase A
LDNGLARTPPMGWLHWERFMCNLDCQEEPDSCISEKLFEEMAERMVTDGWKDAGYEYLCIDDCWMAPQRDSEGRLQADPQRFPHGIRQLANHVHSKGLKLGIYADVGNKTCAGFPGSFGYYDIDAQTFADWGVDLLKFDGCYCDSLENLADGYKDMSLALNKTGRPIVYSCEWPLYMWPFQKPNYTEIRQYCNHWRNFADIDDSWASIKSILDWTSRNQERIVDVAGPGGWNDPDMLVIGNFGLSWDQQVTQMALWAIMAGPLFMSNDLRAISPQAKALLQDKDVIAINQDPLGKQGYQLRKGDNFEVWERPLSGDAWAVAIINRQEIGGPRGYTIPVASLGKGVACNPACFITQLLPVKRKLGFYEATSRLRSHINPTGTVLLQLENTMQTSLKDLL

SEQ ID NO: 863 - DNA, 1194 bp, Artificial Sequence
  variant of human alpha-galactosidase A
ctggataatggattggctagaacacctcctatggggtggcttcactgggagaggttcatgtgcaacctggactgtcaggaagaaccagacagctgcatctccgagaagctctttgaggaaatggccgaacgaatggtgactgacggctggaaagatgcaggttacgagtatctgtgtattgacgattgctggatggccccacaacgggattctgagggaagacttcaggctgatccgcagcgcttccctcatggcataaggcagctggcaaaccacgtccacagtaaggggctcaaattgggaatctacgcggacgtgggcaataagacctgtgccggttttccgggatcattcgggtattatgacattgacgcccaaacgtttgctgattggggcgttgacctgctgaaattcgatggttgctactgtgacagcctcgaaaacctggcagacggctacaagtttatgtctctcgccctgaataaaaccggtcggccaatcgtatattcctgcgagtggcctctttacatgtggccatttcagaaaccgaactacacagaaattcgccagtattgcaatcattggaggaacttcgctgatatcgatgactcatgggcctccataaagagcatcttggactggaccagtcggaatcaggagcgaattgtggatgtcgcaggccctggaggatggaacgatccagacatgctggtgatcggcaattttggcctctcttgggaccagcaggttacccaaatggctctgtgggcaattatggccggtcctcttttcatgagcaacgatctgcgcgcgatctcaccacaggcaaaggccctgctccaagacaaagatgtgatagccatcaatcaggacccgttgggaaagcagggctaccagctgagaaaaggcgacaactttgaggtctgggaaaggcctttgagtggagatgcgtgggctgtggccattattaatcggcaagagatcggaggtccacgcggttatacaattcctgtagcatctcttggcaagggcgttgcctgtaacccagcttgcttcatcactcagcttctgccggtgaagagaaaactgggtttctacgaagctaccagcaggctccgatcccacatcaaccctacaggaaccgtcctcttgcagctggagaatacgatgcagacttcactgaaggacctcctg

SEQ ID NO: 864 - protein, 398 aa, Artificial Sequence
  variant of human alpha-galactosidase A
LDNGLARTPPMGWLHWERFMCNLDCQEEPDSCISEKLFEEMAERMVTDGWKDAGYEYLCIDDCWMAPQRDSEGRLQADPQRFPHGIRQLANHVHSKGLKLGIYADVGNKTCAGFPGSFGYYDIDAQTFADWGVDLLKFDGCYCDSLENLADGYKFMSLALNKTGRPIVYSCEWPLYMWPFQKPNYTEIRQYCNHWRNFADIDDSWASIKSILDWTSRNQERIVDVAGPGGWNDPDMLVIGNFGLSWDQQVTQMALWAIMAGPLFMSNDLRAISPQAKALLQDKDVIAINQDPLGKQGYQLRKGDNFEVWERPLSGDAWAVAIINRQEIGGPRGYTIPVASLGKGVACNPACFITQLLPVKRKLGFYEATSRLRSHINPTGTVLLQLENTMQTSLKDLL

SEQ ID NO: 865 - DNA, 1194 bp, Artificial Sequence
  variant of human alpha-galactosidase A
ctggataatggattggctagaacacctcctatggggtggcttcactgggagaggttcatgtgcaacctggactgtcaggaagaaccagacagctgcatctccgagaagctctttgaggaaatggccgaacgaatggtgactgacggctggaaagatgcaggttacgagtatctgtgtattgacgattgctggatggccccacaacgggattctgagggaagacttcaggctgatccgcagcgcttccctcatggcataaggcagctggcaaaccacgtccacagtaaggggctcaaattgggaatctacgcggacgtgggcaataagacctgtgccggttttccgggatcattcgggtattatgacattgacgcccaaacgtttgctgattggggcgttgacctgctgaaattcgatggttgctactgtgacagcctcgaaaacctggcagacggctacaagttgatgtctctcgccctgaataaaaccggtcggccaatcgtatattcctgcgagtggcctctttacatgtggccatttcagaaaccgaactacacagaaattcgccagtattgcaatcattggaggaacttcgctgatatcgatgactcatgggcctccataaagagcatcttggactggaccagtcggaatcaggagcgaattgtggatgtcgcaggccctggaggatggaacgatccagacatgctggtgatcggcaattttggcctctcttgggaccagcaggttacccaaatggctctgtgggcaattatggccggtcctcttttcatgagcaacgatctgcgcgcgatctcaccacaggcaaaggccctgctccaagacaaagatgtgatagccatcaatcaggacccgttgggaaagcagggctaccagctgagaaaaggcgacaactttgaggtctgggaaaggcctttgagtggagatgcgtgggctgtggccattattaatcggcaagagatcggaggtccacgcggttatacaattcctgtagcatctcttggcaagggcgttgcctgtaacccagcttgcttcatcactcagcttctgccggtgaagagaaaactgggtttctacgaagctaccagcaggctccgatcccacatcaaccctacaggaaccgtcctcttgcagctggagaatacgatgcagacttcactgaaggacctcctg

SEQ ID NO: 866 - protein, 398 aa, Artificial Sequence
  variant of human alpha-galactosidase A
LDNGLARTPPMGWLHWERFMCNLDCQEEPDSCISEKLFEEMAERMVTDGWKDAGYEYLCIDDCWMAPQRDSEGRLQADPQRFPHGIRQLANHVHSKGLKLGIYADVGNKTCAGFPGSFGYYDIDAQTFADWGVDLLKFDGCYCDSLENLADGYKLMSLALNKTGRPIVYSCEWPLYMWPFQKPNYTEIRQYCNHWRNFADIDDSWASIKSILDWTSRNQERIVDVAGPGGWNDPDMLVIGNFGLSWDQQVTQMALWAIMAGPLFMSNDLRAISPQAKALLQDKDVIAINQDPLGKQGYQLRKGDNFEVWERPLSGDAWAVAIINRQEIGGPRGYTIPVASLGKGVACNPACFITQLLPVKRKLGFYEATSRLRSHINPTGTVLLQLENTMQTSLKDLL

SEQ ID NO: 867 - DNA, 1194 bp, Artificial Sequence
  variant of human alpha-galactosidase A
ctggataatggattggctagaacacctcctatggggtggcttcactgggagaggttcatgtgcaacctggactgtcaggaagaaccagacagctgcatctccgagaagctctttgaggaaatggccgaacgaatggtgactgacggctggaaagatgcaggttacgagtatctgtgtattgacgattgctggatggccccacaacgggattctgagggaagacttcaggctgatccgcagcgcttccctcatggcataaggcagctggcaaaccacgtccacagtaaggggctcaaattgggaatctacgcggacgtgggcaataagacctgtgccggttttccgggatcattcgggtattatgacattgacgcccaaacgtttgctgattggggcgttgacctgctgaaattcgatggttgctactgtgacagcctcgaaaacctggcagacggctacaagcgtatgtctctcgccctgaataaaaccggtcggccaatcgtatattcctgcgagtggcctctttacatgtggccatttcagaaaccgaactacacagaaattcgccagtattgcaatcattggaggaacttcgctgatatcgatgactcatgggcctccataaagagcatcttggactggaccagtcggaatcaggagcgaattgtggatgtcgcaggccctggaggatggaacgatccagacatgctggtgatcggcaattttggcctctcttgggaccagcaggttacccaaatggctctgtgggcaattatggccggtcctcttttcatgagcaacgatctgcgcgcgatctcaccacaggcaaaggccctgctccaagacaaagatgtgatagccatcaatcaggacccgttgggaaagcagggctaccagctgagaaaaggcgacaactttgaggtctgggaaaggcctttgagtggagatgcgtgggctgtggccattattaatcggcaagagatcggaggtccacgcggttatacaattcctgtagcatctcttggcaagggcgttgcctgtaacccagcttgcttcatcactcagcttctgccggtgaagagaaaactgggtttctacgaagctaccagcaggctccgatcccacatcaaccctacaggaaccgtcctcttgcagctggagaatacgatgcagacttcactgaaggacctcctg

SEQ ID NO: 868 - protein, 398 aa, Artificial Sequence
  variant of human alpha-galactosidase A
LDNGLARTPPMGWLHWERFMCNLDCQEEPDSCISEKLFEEMAERMVTDGWKDAGYEYLCIDDCWMAPQRDSEGRLQADPQRFPHGIRQLANHVHSKGLKLGIYADVGNKTCAGFPGSFGYYDIDAQTFADWGVDLLKFDGCYCDSLENLADGYKRMSLALNKTGRPIVYSCEWPLYMWPFQKPNYTEIRQYCNHWRNFADIDDSWASIKSILDWTSRNQERIVDVAGPGGWNDPDMLVIGNFGLSWDQQVTQMALWAIMAGPLFMSNDLRAISPQAKALLQDKDVIAINQDPLGKQGYQLRKGDNFEVWERPLSGDAWAVAIINRQEIGGPRGYTIPVASLGKGVACNPACFITQLLPVKRKLGFYEATSRLRSHINPTGTVLLQLENTMQTSLKDLL

SEQ ID NO: 869 - DNA, 1194 bp, Artificial Sequence
  variant of human alpha-galactosidase A
ctggataatggattggctagaacacctcctatggggtggcttcactgggagaggttcatgtgcaacctggactgtcaggaagaaccagacagctgcatctccgagaagctctttgaggaaatggccgaacgaatggtgactgacggctggaaagatgcaggttacgagtatctgtgtattgacgattgctggatggccccacaacgggattctgagggaagacttcaggctgatccgcagcgcttccctcatggcataaggcagctggcaaaccacgtccacagtaaggggctcaaattgggaatctacgcggacgtgggcaataagacctgtgccggttttccgggatcattcgggtattatgacattgacgcccaaacgtttgctgattggggcgttgacctgctgaaattcgatggttgctactgtgacagcctcgaaaacctggcagacggctacaagactatgtctctcgccctgaataaaaccggtcggccaatcgtatattcctgcgagtggcctctttacatgtggccatttcagaaaccgaactacacagaaattcgccagtattgcaatcattggaggaacttcgctgatatcgatgactcatgggcctccataaagagcatcttggactggaccagtcggaatcaggagcgaattgtggatgtcgcaggccctggaggatggaacgatccagacatgctggtgatcggcaattttggcctctcttgggaccagcaggttacccaaatggctctgtgggcaattatggccggtcctcttttcatgagcaacgatctgcgcgcgatctcaccacaggcaaaggccctgctccaagacaaagatgtgatagccatcaatcaggacccgttgggaaagcagggctaccagctgagaaaaggcgacaactttgaggtctgggaaaggcctttgagtggagatgcgtgggctgtggccattattaatcggcaagagatcggaggtccacgcggttatacaattcctgtagcatctcttggcaagggcgttgcctgtaacccagcttgcttcatcactcagcttctgccggtgaagagaaaactgggtttctacgaagctaccagcaggctccgatcccacatcaaccctacaggaaccgtcctcttgcagctggagaatacgatgcagacttcactgaaggacctcctg

SEQ ID NO: 870 - protein, 398 aa, Artificial Sequence
  variant of human alpha-galactosidase A
LDNGLARTPPMGWLHWERFMCNLDCQEEPDSCISEKLFEEMAERMVTDGWKDAGYEYLCIDDCWMAPQRDSEGRLQADPQRFPHGIRQLANHVHSKGLKLGIYADVGNKTCAGFPGSFGYYDIDAQTFADWGVDLLKFDGCYCDSLENLADGYKTMSLALNKTGRPIVYSCEWPLYMWPFQKPNYTEIRQYCNHWRNFADIDDSWASIKSILDWTSRNQERIVDVAGPGGWNDPDMLVIGNFGLSWDQQVTQMALWAIMAGPLFMSNDLRAISPQAKALLQDKDVIAINQDPLGKQGYQLRKGDNFEVWERPLSGDAWAVAIINRQEIGGPRGYTIPVASLGKGVACNPACFITQLLPVKRKLGFYEATSRLRSHINPTGTVLLQLENTMQTSLKDLL

SEQ ID NO: 871 - DNA, 1194 bp, Artificial Sequence
  variant of human alpha-galactosidase A
ctggataatggattggctagaacacctcctatggggtggcttcactgggagaggttcatgtgcaacctggactgtcaggaagaaccagacagctgcatctccgagaagctctttgaggaaatggccgaacgaatggtgactgacggctggaaagatgcaggttacgagtatctgtgtattgacgattgctggatggccccacaacgggattctgagggaagacttcaggctgatccgcagcgcttccctcatggcataaggcagctggcaaaccacgtccacagtaaggggctcaaattgggaatctacgcggacgtgggcaataagacctgtgccggttttccgggatcattcgggtattatgacattgacgcccaaacgtttgctgattggggcgttgacctgctgaaattcgatggttgctactgtgacagcctcgaaaacctggcagacggctacaagcatatgtctctcgccctgaataaaaccggtcggccaatcgtatattcctgcgagtggcctctttacatgtggccatttcagaaaccgaactacacagaaattcgccagtattgcaatcattggaggaacttcgctgatatcgatgactcatgggcctccataaagagcatcttggactggaccagtcggaatcaggagcgaattgtggatgtcgcaggccctggaggatggaacgatccagacatgctggtgatcggcaattttggcctctcttgggaccagcaggttacccaaatggctctgtgggcaattatggccggtcctcttttcatgagcaacgatctgcgcgcgatctcaccacaggcaaaggccctgctccaagacaaagatgtgatagccatcaatcaggacccgttgggaaagcagggctaccagctgagaaaaggcgacaactttgaggtctgggaaaggcctttgagtggagatgcgtgggctgtggccattattaatcggcaagagatcggaggtccacgcggttatacaattcctgtagcatctcttggcaagggcgttgcctgtaacccagcttgcttcatcactcagcttctgccggtgaagagaaaactgggtttctacgaagctaccagcaggctccgatccttgatcaaccctacaggaaccgtcctcttgcagctggagaatacgatgcagacttcactgaaggacctcctg

SEQ ID NO: 872 - protein, 398 aa, Artificial Sequence
  variant of human alpha-galactosidase A
LDNGLARTPPMGWLHWERFMCNLDCQEEPDSCISEKLFEEMAERMVTDGWKDAGYEYLCIDDCWMAPQRDSEGRLQADPQRFPHGIRQLANHVHSKGLKLGIYADVGNKTCAGFPGSFGYYDIDAQTFADWGVDLLKFDGCYCDSLENLADGYKHMSLALNKTGRPIVYSCEWPLYMWPFQKPNYTEIRQYCNHWRNFADIDDSWASIKSILDWTSRNQERIVDVAGPGGWNDPDMLVIGNFGLSWDQQVTQMALWAIMAGPLFMSNDLRAISPQAKALLQDKDVIAINQDPLGKQGYQLRKGDNFEVWERPLSGDAWAVAIINRQEIGGPRGYTIPVASLGKGVACNPACFITQLLPVKRKLGFYEATSRLRSLINPTGTVLLQLENTMQTSLKDLL

SEQ ID NO: 873 - DNA, 1194 bp, Artificial Sequence
  variant of human alpha-galactosidase A
ctggataatggattggctagaacacctcctatggggtggcttcactgggagaggttcatgtgcaacctggactgtcaggaagaaccagacagctgcatctccgagaagctctttgaggaaatggccgaacgaatggtgactgacggctggaaagatgcaggttacgagtatctgtgtattgacgattgctggatggccccacaacgggattctgagggaagacttcaggctgatccgcagcgcttccctcatggcataaggcagctggcaaaccacgtccacagtaaggggctcaaattgggaatctacgcggacgtgggcaataagacctgtgccggttttccgggatcattcgggtattatgacattgacgcccaaacgtttgctgattggggcgttgacctgctgaaattcgatggttgctactgtgacagcctcgaaaacctggcagacggctacaagcatatgtctctcgccctgaataaaaccggtcggccaatcgtatattcctgcgagtggcctctttacatgtggccatttcagaaaccgaactacacagaaattcgccagtattgcaatcattggaggaacttcgctgatatcgatgactcatgggcctccataaagagcatcttggactggaccagtcggaatcaggagcgaattgtggatgtcgcaggccctggaggatggaacgatccagacatgctggtgatcggcaattttggcctctcttgggaccagcaggttacccaaatggctctgtgggcaattatggccggtcctcttttcatgagcaacgatctgcgcgcgatctcaccacaggcaaaggccctgctccaagacaaagatgtgatagccatcaatcaggacccgttgggaaagcagggctaccagctgagaaaaggcgacaactttgaggtctgggaaaggcctttgagtggagatgcgtgggctgtggccattattaatcggcaagagatcggaggtccacgcggttatacaattcctgtagcatctcttggcaagggcgttgcctgtaacccagcttgcttcatcactcagcttctgccggtgaagagaaaactgggtttctacgaagctaccagcaggctccgatcccagatcaaccctacaggaaccgtcctcttgcagctggagaatacgatgcagacttcactgaaggacctcctg

SEQ ID NO: 874 - protein, 398 aa, Artificial Sequence
  variant of human alpha-galactosidase A
LDNGLARTPPMGWLHWERFMCNLDCQEEPDSCISEKLFEEMAERMVTDGWKDAGYEYLCIDDCWMAPQRDSEGRLQADPQRFPHGIRQLANHVHSKGLKLGIYADVGNKTCAGFPGSFGYYDIDAQTFADWGVDLLKFDGCYCDSLENLADGYKHMSLALNKTGRPIVYSCEWPLYMWPFQKPNYTEIRQYCNHWRNFADIDDSWASIKSILDWTSRNQERIVDVAGPGGWNDPDMLVIGNFGLSWDQQVTQMALWAIMAGPLFMSNDLRAISPQAKALLQDKDVIAINQDPLGKQGYQLRKGDNFEVWERPLSGDAWAVAIINRQEIGGPRGYTIPVASLGKGVACNPACFITQLLPVKRKLGFYEATSRLRSQINPTGTVLLQLENTMQTSLKDLL

SEQ ID NO: 875 - DNA, 1194 bp, Artificial Sequence
  variant of human alpha-galactosidase A
ctggataatggattggctagaacacctcctatggggtggcttcactgggagaggttcatgtgcaacctggactgtcaggaagaaccagacagctgcatctccgagaagctctttgaggaaatggccgaacgaatggtgactgacggctggaaagatgcaggttacgagtatctgtgtattgacgattgctggatggccccacaacgggattctgagggaagacttcaggctgatccgcagcgcttccctgggggcataaggcagctggcaaaccacgtccacagtaaggggctcaaattgggaatctacgcggacgtgggcaataagacctgtgccggttttccgggatcattcgggtattatgacattgacgcccaaacgtttgctgattggggcgttgacctgctgaaattcgatggttgctactgtgacagcctcgaaaacctggcagacggctacaagcatatgtctctcgccctgaataaaaccggtcggccaatcgtatattcctgcgagtggcctctttacatgtggccatttcagaaaccgaactacacagaaattcgccagtattgcaatcattggaggaacttcgctgatatcgatgactcatgggcctccataaagagcatcttggactggaccagtcggaatcaggagcgaattgtggatgtcgcaggccctggaggatggaacgatccagacatgctggtgatcggcaattttggcctctcttgggaccagcaggttacccaaatggctctgtgggcaattatggccggtcctcttttcatgagcaacgatctgcgcgcgatctcaccacaggcaaaggccctgctccaagacaaagatgtgatagccatcaatcaggacccgttgggaaagcagggctaccagctgagaaaaggcgacaactttgaggtctgggaaaggcctttgagtggagatgcgtgggctgtggccattattaatcggcaagagatcggaggtccacgcggttatacaattcctgtagcatctcttggcaagggcgttgcctgtaacccagcttgcttcatcactcagcttctgccggtgaagagaaaactgggtttctacgaagctaccagcaggctccgatcccacatcaaccctacaggaaccgtcctcttgcagctggagaatacgatgcagacttcactgaaggacctcctg

SEQ ID NO: 876 - protein, 398 aa, Artificial Sequence
  variant of human alpha-galactosidase A
LDNGLARTPPMGWLHWERFMCNLDCQEEPDSCISEKLFEEMAERMVTDGWKDAGYEYLCIDDCWMAPQRDSEGRLQADPQRFPGGIRQLANHVHSKGLKLGIYADVGNKTCAGFPGSFGYYDIDAQTFADWGVDLLKFDGCYCDSLENLADGYKHMSLALNKTGRPIVYSCEWPLYMWPFQKPNYTEIRQYCNHWRNFADIDDSWASIKSILDWTSRNQERIVDVAGPGGWNDPDMLVIGNFGLSWDQQVTQMALWAIMAGPLFMSNDLRAISPQAKALLQDKDVIAINQDPLGKQGYQLRKGDNFEVWERPLSGDAWAVAIINRQEIGGPRGYTIPVASLGKGVACNPACFITQLLPVKRKLGFYEATSRLRSHINPTGTVLLQLENTMQTSLKDLL

SEQ ID NO: 877 - DNA, 1194 bp, Artificial Sequence
  variant of human alpha-galactosidase A
ctggataatggattggctagaacacctcctatggggtggcttcactgggagaggttcatgtgcaacctggactgtcaggaagaaccagacagctgcatctccgagaagctctttgaggaaatggccgaacgaatggtgactgacggctggaaagatgcaggttacgagtatctgtgtattgacgattgctggatggccccacaacgggattctgagggaagacttcaggctgatccgcagcgcttccctaagggcataaggcagctggcaaaccacgtccacagtaaggggctcaaattgggaatctacgcggacgtgggcaataagacctgtgccggttttccgggatcattcgggtattatgacattgacgcccaaacgtttgctgattggggcgttgacctgctgaaattcgatggttgctactgtgacagcctcgaaaacctggcagacggctacaagcatatgtctctcgccctgaataaaaccggtcggccaatcgtatattcctgcgagtggcctctttacatgtggccatttcagaaaccgaactacacagaaattcgccagtattgcaatcattggaggaacttcgctgatatcgatgactcatgggcctccataaagagcatcttggactggaccagtcggaatcaggagcgaattgtggatgtcgcaggccctggaggatggaacgatccagacatgctggtgatcggcaattttggcctctcttgggaccagcaggttacccaaatggctctgtgggcaattatggccggtcctcttttcatgagcaacgatctgcgcgcgatctcaccacaggcaaaggccctgctccaagacaaagatgtgatagccatcaatcaggacccgttgggaaagcagggctaccagctgagaaaaggcgacaactttgaggtctgggaaaggcctttgagtggagatgcgtgggctgtggccattattaatcggcaagagatcggaggtccacgcggttatacaattcctgtagcatctcttggcaagggcgttgcctgtaacccagcttgcttcatcactcagcttctgccggtgaagagaaaactgggtttctacgaagctaccagcaggctccgatcccacatcaaccctacaggaaccgtcctcttgcagctggagaatacgatgcagacttcactgaaggacctcctg

SEQ ID NO: 878 - protein, 398 aa, Artificial Sequence
  variant of human alpha-galactosidase A
LDNGLARTPPMGWLHWERFMCNLDCQEEPDSCISEKLFEEMAERMVTDGWKDAGYEYLCIDDCWMAPQRDSEGRLQADPQRFPKGIRQLANHVHSKGLKLGIYADVGNKTCAGFPGSFGYYDIDAQTFADWGVDLLKFDGCYCDSLENLADGYKHMSLALNKTGRPIVYSCEWPLYMWPFQKPNYTEIRQYCNHWRNFADIDDSWASIKSILDWTSRNQERIVDVAGPGGWNDPDMLVIGNFGLSWDQQVTQMALWAIMAGPLFMSNDLRAISPQAKALLQDKDVIAINQDPLGKQGYQLRKGDNFEVWERPLSGDAWAVAIINRQEIGGPRGYTIPVASLGKGVACNPACFITQLLPVKRKLGFYEATSRLRSHINPTGTVLLQLENTMQTSLKDLL

SEQ ID NO: 879 - DNA, 1194 bp, Artificial Sequence
  variant of human alpha-galactosidase A
ctggataatggattggctagaacacctcctatggggtggcttcactgggagaggttcatgtgcaacctggactgtcaggaagaaccagacagctgcatctccgagaagctctttgaggaaatggccgaacgaatggtgactgacggctggaaagatgcaggttacgagtatctgtgtattgacgattgctggatggccccacaacgggattctgagggaagacttcaggctgatccgcagcgcttccctcggggcataaggcagctggcaaaccacgtccacagtaaggggctcaaattgggaatctacgcggacgtgggcaataagacctgtgccggttttccgggatcattcgggtattatgacattgacgcccaaacgtttgctgattggggcgttgacctgctgaaattcgatggttgctactgtgacagcctcgaaaacctggcagacggctacaagcatatgtctctcgccctgaataaaaccggtcggccaatcgtatattcctgcgagtggcctctttacatgtggccatttcagaaaccgaactacacagaaattcgccagtattgcaatcattggaggaacttcgctgatatcgatgactcatgggcctccataaagagcatcttggactggaccagtcggaatcaggagcgaattgtggatgtcgcaggccctggaggatggaacgatccagacatgctggtgatcggcaattttggcctctcttgggaccagcaggttacccaaatggctctgtgggcaattatggccggtcctcttttcatgagcaacgatctgcgcgcgatctcaccacaggcaaaggccctgctccaagacaaagatgtgatagccatcaatcaggacccgttgggaaagcagggctaccagctgagaaaaggcgacaactttgaggtctgggaaaggcctttgagtggagatgcgtgggctgtggccattattaatcggcaagagatcggaggtccacgcggttatacaattcctgtagcatctcttggcaagggcgttgcctgtaacccagcttgcttcatcactcagcttctgccggtgaagagaaaactgggtttctacgaagctaccagcaggctccgatcccacatcaaccctacaggaaccgtcctcttgcagctggagaatacgatgcagacttcactgaaggacctcctg

SEQ ID NO: 880 - protein, 398 aa, Artificial Sequence
  variant of human alpha-galactosidase A
LDNGLARTPPMGWLHWERFMCNLDCQEEPDSCISEKLFEEMAERMVTDGWKDAGYEYLCIDDCWMAPQRDSEGRLQADPQRFPRGIRQLANHVHSKGLKLGIYADVGNKTCAGFPGSFGYYDIDAQTFADWGVDLLKFDGCYCDSLENLADGYKHMSLALNKTGRPIVYSCEWPLYMWPFQKPNYTEIRQYCNHWRNFADIDDSWASIKSILDWTSRNQERIVDVAGPGGWNDPDMLVIGNFGLSWDQQVTQMALWAIMAGPLFMSNDLRAISPQAKALLQDKDVIAINQDPLGKQGYQLRKGDNFEVWERPLSGDAWAVAIINRQEIGGPRGYTIPVASLGKGVACNPACFITQLLPVKRKLGFYEATSRLRSHINPTGTVLLQLENTMQTSLKDLL

SEQ ID NO: 881 - DNA, 1194 bp, Artificial Sequence
  variant of human alpha-galactosidase A
ctggataatggattggctagaacacctcctatggggtggcttcactgggagaggttcatgtgcaacctggactgtcaggaagaaccagacagctgcatctccgagaagctctttgaggaaatggccgaacgaatggtgactgacggctggaaagatgcaggttacgagtatctgtgtattgacgattgctggatggccccacaacgggattctgagggaagacttcaggctgatccgcagcgcttccctcatggcataaggcagctggcaaaccacgtccacagtaaggggctcaaattgggaatctacgcggacgtgggcaataagacctgtgccggttttccgggatcattcgggtattatgaccaggacgcccaaacgtttgctgattggggcgttgacctgctgaaattcgatggttgctactgtgacagcctcgaaaacctggcagacggctacaagcatatgtctctcgccctgaataaaaccggtcggccaatcgtatattcctgcgagtggcctctttacatgtggccatttcagaaaccgaactacacagaaattcgccagtattgcaatcattggaggaacttcgctgatatcgatgactcatgggcctccataaagagcatcttggactggaccagtcggaatcaggagcgaattgtggatgtcgcaggccctggaggatggaacgatccagacatgctggtgatcggcaattttggcctctcttgggaccagcaggttacccaaatggctctgtgggcaattatggccggtcctcttttcatgagcaacgatctgcgcgcgatctcaccacaggcaaaggccctgctccaagacaaagatgtgatagccatcaatcaggacccgttgggaaagcagggctaccagctgagaaaaggcgacaactttgaggtctgggaaaggcctttgagtggagatgcgtgggctgtggccattattaatcggcaagagatcggaggtccacgcggttatacaattcctgtagcatctcttggcaagggcgttgcctgtaacccagcttgcttcatcactcagcttctgccggtgaagagaaaactgggtttctacgaagctaccagcaggctccgatcccacatcaaccctacaggaaccgtcctcttgcagctggagaatacgatgcagacttcactgaaggacctcctg

SEQ ID NO: 882 - protein, 398 aa, Artificial Sequence
  variant of human alpha-galactosidase A
LDNGLARTPPMGWLHWERFMCNLDCQEEPDSCISEKLFEEMAERMVTDGWKDAGYEYLCIDDCWMAPQRDSEGRLQADPQRFPHGIRQLANHVHSKGLKLGIYADVGNKTCAGFPGSFGYYDQDAQTFADWGVDLLKFDGCYCDSLENLADGYKHMSLALNKTGRPIVYSCEWPLYMWPFQKPNYTEIRQYCNHWRNFADIDDSWASIKSILDWTSRNQERIVDVAGPGGWNDPDMLVIGNFGLSWDQQVTQMALWAIMAGPLFMSNDLRAISPQAKALLQDKDVIAINQDPLGKQGYQLRKGDNFEVWERPLSGDAWAVAIINRQEIGGPRGYTIPVASLGKGVACNPACFITQLLPVKRKLGFYEATSRLRSHINPTGTVLLQLENTMQTSLKDLL

SEQ ID NO: 883 - DNA, 1194 bp, Artificial Sequence
  variant of human alpha-galactosidase A
ctggataatggattggctagaacacctcctatggggtggcttcactgggagaggttcatgtgcaacctggactgtcaggaagaaccagacagctgcatctccgagaagctctttgaggaaatggccgaacgaatggtgactgacggctggaaagatgcaggttacgagtatctgtgtattgacgattgctggatggccccacaacgggattctgagggaagacttcaggctgatccgcagcgcttccctcatggcataaggcagctggcaaaccacgtccacagtaaggggctcaaattgggaatctacgcggacgtgggcaataagacctgtgccggttttccgggatcattcgggtattatgacagggacgcccaaacgtttgctgattggggcgttgacctgctgaaattcgatggttgctactgtgacagcctcgaaaacctggcagacggctacaagcatatgtctctcgccctgaataaaaccggtcggccaatcgtatattcctgcgagtggcctctttacatgtggccatttcagaaaccgaactacacagaaattcgccagtattgcaatcattggaggaacttcgctgatatcgatgactcatgggcctccataaagagcatcttggactggaccagtcggaatcaggagcgaattgtggatgtcgcaggccctggaggatggaacgatccagacatgctggtgatcggcaattttggcctctcttgggaccagcaggttacccaaatggctctgtgggcaattatggccggtcctcttttcatgagcaacgatctgcgcgcgatctcaccacaggcaaaggccctgctccaagacaaagatgtgatagccatcaatcaggacccgttgggaaagcagggctaccagctgagaaaaggcgacaactttgaggtctgggaaaggcctttgagtggagatgcgtgggctgtggccattattaatcggcaagagatcggaggtccacgcggttatacaattcctgtagcatctcttggcaagggcgttgcctgtaacccagcttgcttcatcactcagcttctgccggtgaagagaaaactgggtttctacgaagctaccagcaggctccgatcccacatcaaccctacaggaaccgtcctcttgcagctggagaatacgatgcagacttcactgaaggacctcctg

SEQ ID NO: 884 - protein, 398 aa, Artificial Sequence
  variant of human alpha-galactosidase A
LDNGLARTPPMGWLHWERFMCNLDCQEEPDSCISEKLFEEMAERMVTDGWKDAGYEYLCIDDCWMAPQRDSEGRLQADPQRFPHGIRQLANHVHSKGLKLGIYADVGNKTCAGFPGSFGYYDRDAQTFADWGVDLLKFDGCYCDSLENLADGYKHMSLALNKTGRPIVYSCEWPLYMWPFQKPNYTEIRQYCNHWRNFADIDDSWASIKSILDWTSRNQERIVDVAGPGGWNDPDMLVIGNFGLSWDQQVTQMALWAIMAGPLFMSNDLRAISPQAKALLQDKDVIAINQDPLGKQGYQLRKGDNFEVWERPLSGDAWAVAIINRQEIGGPRGYTIPVASLGKGVACNPACFITQLLPVKRKLGFYEATSRLRSHINPTGTVLLQLENTMQTSLKDLL

SEQ ID NO: 885 - DNA, 1194 bp, Artificial Sequence
  variant of human alpha-galactosidase A
ctggataatggattggctagaacacctcctatggggtggcttcactgggagaggttcatgtgcaacctggactgtcaggaagaaccagacagctgcatctccgagaagctctttgaggaaatggccgaacgaatggtgactgacggctggaaagatgcaggttacgagtatctgtgtattgacgattgctggatggccccacaacgggattctgagggaagacttcaggctgatccgcagcgcttccctcatggcataaggcagctggcaaaccacgtccacagtaaggggctcaaattgggaatctacgcggacgtgggcaataagacctgtgccggttttccgggatcattcgggtattatgactcggacgcccaaacgtttgctgattggggcgttgacctgctgaaattcgatggttgctactgtgacagcctcgaaaacctggcagacggctacaagcatatgtctctcgccctgaataaaaccggtcggccaatcgtatattcctgcgagtggcctctttacatgtggccatttcagaaaccgaactacacagaaattcgccagtattgcaatcattggaggaacttcgctgatatcgatgactcatgggcctccataaagagcatcttggactggaccagtcggaatcaggagcgaattgtggatgtcgcaggccctggaggatggaacgatccagacatgctggtgatcggcaattttggcctctcttgggaccagcaggttacccaaatggctctgtgggcaattatggccggtcctcttttcatgagcaacgatctgcgcgcgatctcaccacaggcaaaggccctgctccaagacaaagatgtgatagccatcaatcaggacccgttgggaaagcagggctaccagctgagaaaaggcgacaactttgaggtctgggaaaggcctttgagtggagatgcgtgggctgtggccattattaatcggcaagagatcggaggtccacgcggttatacaattcctgtagcatctcttggcaagggcgttgcctgtaacccagcttgcttcatcactcagcttctgccggtgaagagaaaactgggtttctacgaagctaccagcaggctccgatcccacatcaaccctacaggaaccgtcctcttgcagctggagaatacgatgcagacttcactgaaggacctcctg

SEQ ID NO: 886 - protein, 398 aa, Artificial Sequence
  variant of human alpha-galactosidase A
LDNGLARTPPMGWLHWERFMCNLDCQEEPDSCISEKLFEEMAERMVTDGWKDAGYEYLCIDDCWMAPQRDSEGRLQADPQRFPHGIRQLANHVHSKGLKLGIYADVGNKTCAGFPGSFGYYDSDAQTFADWGVDLLKFDGCYCDSLENLADGYKHMSLALNKTGRPIVYSCEWPLYMWPFQKPNYTEIRQYCNHWRNFADIDDSWASIKSILDWTSRNQERIVDVAGPGGWNDPDMLVIGNFGLSWDQQVTQMALWAIMAGPLFMSNDLRAISPQAKALLQDKDVIAINQDPLGKQGYQLRKGDNFEVWERPLSGDAWAVAIINRQEIGGPRGYTIPVASLGKGVACNPACFITQLLPVKRKLGFYEATSRLRSHINPTGTVLLQLENTMQTSLKDLL

SEQ ID NO: 887 - DNA, 1194 bp, Artificial Sequence
  variant of human alpha-galactosidase A
ctggataatggattggctagaacacctcctatggggtggcttcactgggagaggttcatgtgcaacctggactgtcaggaagaaccagacagctgcatctccgagaagctctttgaggaaatggccgaacgaatggtgactgacggctggaaagatgcaggttacgagtatctgtgtattgacgattgctggatggccccacaacgggattctgagggaagacttcaggctgatccgcagcgcttccctcatggcataaggcagctggcaaaccacgtccacagtaaggggctcaaattgggaatctacgcggacgtgggcaataagacctgtgccggttttccgggatcattcgggtattatgacacggacgcccaaacgtttgctgattggggcgttgacctgctgaaattcgatggttgctactgtgacagcctcgaaaacctggcagacggctacaagcatatgtctctcgccctgaataaaaccggtcggccaatcgtatattcctgcgagtggcctctttacatgtggccatttcagaaaccgaactacacagaaattcgccagtattgcaatcattggaggaacttcgctgatatcgatgactcatgggcctccataaagagcatcttggactggaccagtcggaatcaggagcgaattgtggatgtcgcaggccctggaggatggaacgatccagacatgctggtgatcggcaattttggcctctcttgggaccagcaggttacccaaatggctctgtgggcaattatggccggtcctcttttcatgagcaacgatctgcgcgcgatctcaccacaggcaaaggccctgctccaagacaaagatgtgatagccatcaatcaggacccgttgggaaagcagggctaccagctgagaaaaggcgacaactttgaggtctgggaaaggcctttgagtggagatgcgtgggctgtggccattattaatcggcaagagatcggaggtccacgcggttatacaattcctgtagcatctcttggcaagggcgttgcctgtaacccagcttgcttcatcactcagcttctgccggtgaagagaaaactgggtttctacgaagctaccagcaggctccgatcccacatcaaccctacaggaaccgtcctcttgcagctggagaatacgatgcagacttcactgaaggacctcctg

SEQ ID NO: 888 - protein, 398 aa, Artificial Sequence
  variant of human alpha-galactosidase A
LDNGLARTPPMGWLHWERFMCNLDCQEEPDSCISEKLFEEMAERMVTDGWKDAGYEYLCIDDCWMAPQRDSEGRLQADPQRFPHGIRQLANHVHSKGLKLGIYADVGNKTCAGFPGSFGYYDTDAQTFADWGVDLLKFDGCYCDSLENLADGYKHMSLALNKTGRPIVYSCEWPLYMWPFQKPNYTEIRQYCNHWRNFADIDDSWASIKSILDWTSRNQERIVDVAGPGGWNDPDMLVIGNFGLSWDQQVTQMALWAIMAGPLFMSNDLRAISPQAKALLQDKDVIAINQDPLGKQGYQLRKGDNFEVWERPLSGDAWAVAIINRQEIGGPRGYTIPVASLGKGVACNPACFITQLLPVKRKLGFYEATSRLRSHINPTGTVLLQLENTMQTSLKDLL

SEQ ID NO: 889 - DNA, 1194 bp, Artificial Sequence
  variant of human alpha-galactosidase A
ctggataatggattggctagaacacctcctatggggtggcttcactgggagaggttcatgtgcaacctggactgtcaggaagaaccagacagctgcatctccgagaagctctttgaggaaatggccgaacgaatggtgactgacggctggaaagatgcaggttacgagtatctgtgtattgacgattgctggatggccccacaacgggattctgagggaagacttcaggctgatccgcagcgcttccctcatggcataaggcagctggcaaaccacgtccacagtaaggggctcaaattgggaatctacgcggacgtgggcaataagacctgtgccggttttccgggatcattcgggtattatgacattgacgcccaaacgtttgctgattggggcgttgacctgctgaaattcgatggttgctactgtgacagcctcgaaaacctggcagacggctacaagcatatgtctctcgccctgaataaaaccggtcggccaatcgtatattcctgcgagtggcctctttacatgtggccatttcagaaaccgaactacacagaaattcgccagtattgcaatcattggaggaacttcgctgatatcgatgactcatgggcctccataaagagcatcttggactggaccagtcggaatcaggagcgaattgtggatgtcgcaggccctggaggatggaacgatccagacatgctggtgatcggcaattttggcctctcttgggaccagcaggttacccaaatggctctgtgggcaattatggccggtcctcttttcatgagcaacgatctgcgcgcgatctcaccacaggcaaaggccctgctccaagacaaagatgtgatagccatcaatcaggacccgttgggaaagcagggctaccagctgagaaaaggcgacaactttgaggtctgggaaaggcctttgagtggagatgcgtgggctgtggccattattaatcggcaagagatcggaggtccacgcggttatacatttcctgtagcatctcttggcaagggcgttgcctgtaacccagcttgcttcatcactcagcttctgccggtgaagagaaaactgggtttctacgaagctaccagcaggctccgatcccacatcaaccctacaggaaccgtcctcttgcagctggagaatacgatgcagacttcactgaaggacctcctg

SEQ ID NO: 890 - protein, 398 aa, Artificial Sequence
  variant of human alpha-galactosidase A
LDNGLARTPPMGWLHWERFMCNLDCQEEPDSCISEKLFEEMAERMVTDGWKDAGYEYLCIDDCWMAPQRDSEGRLQADPQRFPHGIRQLANHVHSKGLKLGIYADVGNKTCAGFPGSFGYYDIDAQTFADWGVDLLKFDGCYCDSLENLADGYKHMSLALNKTGRPIVYSCEWPLYMWPFQKPNYTEIRQYCNHWRNFADIDDSWASIKSILDWTSRNQERIVDVAGPGGWNDPDMLVIGNFGLSWDQQVTQMALWAIMAGPLFMSNDLRAISPQAKALLQDKDVIAINQDPLGKQGYQLRKGDNFEVWERPLSGDAWAVAIINRQEIGGPRGYTFPVASLGKGVACNPACFITQLLPVKRKLGFYEATSRLRSHINPTGTVLLQLENTMQTSLKDLL

SEQ ID NO: 891 - DNA, 1194 bp, Artificial Sequence
  variant of human alpha-galactosidase A
ctggataatggattggctagaacacctcctatggggtggcttcactgggagaggttcatgtgcaacctggactgtcaggaagaaccagacagctgcatctccgagaagctctttgaggaaatggccgaacgaatggtgactgacggctggaaagatgcaggttacgagtatctgtgtattgacgattgctggatggccccacaacgggattctgagggaagacttcaggctgatccgcagcgcttccctcatggcataaggcagctggcaaaccacgtccacagtaaggggctcaaattgggaatctacgcggacgtgggcaataagacctgtgccggttttccgggatcattcgggtattatgacattgacgcccaaacgtttgctgattggggcgttgacctgctgaaattcgatggttgctactgtgacagcctcgaaaacctggcagacggctacaagcatatgtctctcgccctgaataaaaccggtcggccaatcgtatattcctgcgagtggcctctttacatgtggccatttcagaaaccgaactacacagaaattcgccagtattgcaatcattggaggaacttcgctgatatcgatgactcatgggcctccataaagagcatcttggactggaccagtcggaatcaggagcgaattgtggatgtcgcaggccctggaggatggaacgatccagacatgctggtgatcggcaattttggcctctcttgggaccagcaggttacccaaatggctctgtgggcaattatggccggtcctcttttcatgagcaacgatctgcgcgcgatctcaccacaggcaaaggccctgctccaagacaaagatgtgatagccatcaatcaggacccgttgggaaagcagggctaccagctgagaaaaggcgacaactttgaggtctgggaaaggcctttgagtggagatgcgtgggctgtggccattattaatcggcaagagatcggaggtccacgcggttatacaggtcctgtagcatctcttggcaagggcgttgcctgtaacccagcttgcttcatcactcagcttctgccggtgaagagaaaactgggtttctacgaagctaccagcaggctccgatcccacatcaaccctacaggaaccgtcctcttgcagctggagaatacgatgcagacttcactgaaggacctcctg

SEQ ID NO: 892 - protein, 398 aa, Artificial Sequence
  variant of human alpha-galactosidase A
LDNGLARTPPMGWLHWERFMCNLDCQEEPDSCISEKLFEEMAERMVTDGWKDAGYEYLCIDDCWMAPQRDSEGRLQADPQRFPHGIRQLANHVHSKGLKLGIYADVGNKTCAGFPGSFGYYDIDAQTFADWGVDLLKFDGCYCDSLENLADGYKHMSLALNKTGRPIVYSCEWPLYMWPFQKPNYTEIRQYCNHWRNFADIDDSWASIKSILDWTSRNQERIVDVAGPGGWNDPDMLVIGNFGLSWDQQVTQMALWAIMAGPLFMSNDLRAISPQAKALLQDKDVIAINQDPLGKQGYQLRKGDNFEVWERPLSGDAWAVAIINRQEIGGPRGYTGPVASLGKGVACNPACFITQLLPVKRKLGFYEATSRLRSHINPTGTVLLQLENTMQTSLKDLL

SEQ ID NO: 893 - DNA, 1194 bp, Artificial Sequence
  variant of human alpha-galactosidase A
ctggataatggattggctagaacacctcctatggggtggcttcactgggagaggttcatgtgcaacctggactgtcaggaagaaccagacagctgcatctccgagaagctctttgaggaaatggccgaacgaatggtgactgacggctggaaagatgcaggttacgagtatctgtgtattgacgattgctggatggccccacaacgggattctgagggaagacttcaggctgatccgcagcgcttccctcatggcataaggcagctggcaaaccacgtccacagtaaggggctcaaattgggaatctacgcggacgtgggcaataagacctgtgccggttttccgggatcattcgggtattatgacattgacgcccaaacgtttgctgattggggcgttgacctgctgaaattcgatggttgctactgtgacagcctcgaaaacctggcagacggctacaagcatatgtctctcgccctgaataaaaccggtcggccaatcgtatattcctgcgagtggcctctttacatgtggccatttcagaaaccgaactacacagaaattcgccagtattgcaatcattggaggaacttcgctgatatcgatgactcatgggcctccataaagagcatcttggactggaccagtcggaatcaggagcgaattgtggatgtcgcaggccctggaggatggaacgatccagacatgctggtgatcggcaattttggcctctcttgggaccagcaggttacccaaatggctctgtgggcaattatggccggtcctcttttcatgagcaacgatctgcgcgcgatctcaccacaggcaaaggccctgctccaagacaaagatgtgatagccatcaatcaggacccgttgggaaagcagggctaccagctgagaaaaggcgacaactttgaggtctgggaaaggcctttgagtggagatgcgtgggctgtggccattattaatcggcaagagatcggaggtccacgcggttatacaagtcctgtagcatctcttggcaagggcgttgcctgtaacccagcttgcttcatcactcagcttctgccggtgaagagaaaactgggtttctacgaagctaccagcaggctccgatcccacatcaaccctacaggaaccgtcctcttgcagctggagaatacgatgcagacttcactgaaggacctcctg

SEQ ID NO: 894 - protein, 398 aa, Artificial Sequence
  variant of human alpha-galactosidase A
LDNGLARTPPMGWLHWERFMCNLDCQEEPDSCISEKLFEEMAERMVTDGWKDAGYEYLCIDDCWMAPQRDSEGRLQADPQRFPHGIRQLANHVHSKGLKLGIYADVGNKTCAGFPGSFGYYDIDAQTFADWGVDLLKFDGCYCDSLENLADGYKHMSLALNKTGRPIVYSCEWPLYMWPFQKPNYTEIRQYCNHWRNFADIDDSWASIKSILDWTSRNQERIVDVAGPGGWNDPDMLVIGNFGLSWDQQVTQMALWAIMAGPLFMSNDLRAISPQAKALLQDKDVIAINQDPLGKQGYQLRKGDNFEVWERPLSGDAWAVAIINRQEIGGPRGYTSPVASLGKGVACNPACFITQLLPVKRKLGFYEATSRLRSHINPTGTVLLQLENTMQTSLKDLL

SEQ ID NO: 895 - DNA, 1194 bp, Artificial Sequence
  variant of human alpha-galactosidase A
ctggataatggattggctagaacacctcctatggggtggcttcactgggagaggttcatgtgcaacctggactgtcaggaagaaccagacagctgcatctccgagaagctctttgaggaaatggccgaacgaatggtgactgacggctggaaagatgcaggttacgagtatctgtgtattgacgattgctggatggccccacaacgggattctgagggaagacttcaggctgatccgcagcgcttccctcatggcataaggcagctggcaaaccacgtccacagtaaggggctcaaattgggaatctacgcggacgtgggcaataagacctgtgccggttttccgggatcattcgggtattatgacattgacgcccaaacgtttgctgattggggcgttgacctgctgaaattcgatggttgctactgtgacagcctcgaaaacctggcagacggctacaagcatatgtctctcgccctgaataaaaccggtcggccaatcgtatattcctgcgagtggcctctttacatgtggccatttcagaaaccgaactacacagaaattcgccagtattgcaatcattggaggaacttcgctgatatcgatgactcatgggcctccataaagagcatcttggactggaccagtcggaatcaggagcgaattgtggatgtcgcaggccctggaggatggaacgatccagacatgctggtgatcggcaattttggcctctcttgggaccagcaggttacccaaatggctctgtgggcaattatggccggtcctcttttcatgagcaacgatctgcgcgcgatctcaccacaggcaaaggccctgctccaagacaaagatgtgatagccatcaatcaggacccgttgggaaagcagggctaccagctgagaaaaggcgacaactttgaggtctgggaaaggcctttgagtggagatgcgtgggctgtggccattattaatcggcaagagatcggaggtccacgcggttatacaacgcctgtagcatctcttggcaagggcgttgcctgtaacccagcttgcttcatcactcagcttctgccggtgaagagaaaactgggtttctacgaagctaccagcaggctccgatcccacatcaaccctacaggaaccgtcctcttgcagctggagaatacgatgcagacttcactgaaggacctcctg

SEQ ID NO: 896 - protein, 398 aa, Artificial Sequence
  variant of human alpha-galactosidase A
LDNGLARTPPMGWLHWERFMCNLDCQEEPDSCISEKLFEEMAERMVTDGWKDAGYEYLCIDDCWMAPQRDSEGRLQADPQRFPHGIRQLANHVHSKGLKLGIYADVGNKTCAGFPGSFGYYDIDAQTFADWGVDLLKFDGCYCDSLENLADGYKHMSLALNKTGRPIVYSCEWPLYMWPFQKPNYTEIRQYCNHWRNFADIDDSWASIKSILDWTSRNQERIVDVAGPGGWNDPDMLVIGNFGLSWDQQVTQMALWAIMAGPLFMSNDLRAISPQAKALLQDKDVIAINQDPLGKQGYQLRKGDNFEVWERPLSGDAWAVAIINRQEIGGPRGYTTPVASLGKGVACNPACFITQLLPVKRKLGFYEATSRLRSHINPTGTVLLQLENTMQTSLKDLL

SEQ ID NO: 897 - DNA, 1194 bp, Artificial Sequence
  variant of human alpha-galactosidase A
ctggataatggattggctagaacacctcctatggggtggcttcactgggagaggttcatgtgcaacctggactgtcaggaagaaccagacagctgcatctccgagaagctctttgaggaaatggccgaacgaatggtgactgacggctggaaagatgcaggttacgagtatctgtgtattgacgattgctggatggccccacaacgggattctgagggaagacttcaggctgatccgcagcgcttccctcatggcataaggcagctggcaaaccacgtccacagtaaggggctcaaattgggaatctacgcggacgtgggcaataagacctgtgccggttttccgggatcattcgggtattatgacattgacgcccaaacgtttgctgattggggcgttgacctgctgaaattcgatggttgctactgtgacagcctcgaaaacctggcagacggctacaagcatatgtctctcgccctgaataaaaccggtcggccaatcgtatattcctgcgagtggcctctttacatgtggccatttcagaaaccgaactacacagaaattcgccagtattgcaatcattggaggaacttcgctgatatcgatgactcatgggcctccataaagagcatcttggactggaccagtcggaatcaggagcgaattgtggatgtcgcaggccctggaggatggaacgatccagacatgctggtgatcggcaattttggcctctcttgggaccagcaggttacccaaatggctctgtgggcaattatggccggtcctcttttcatgagcaacgatctgcgcgcgatctcaccacaggcacaggccctgctccaagacaaagatgtgatagccatcaatcaggacccgttgggaaagcagggctaccagctgagaaaaggcgacaactttgaggtctgggaaaggcctttgagtggagatgcgtgggctgtggccattattaatcggcaagagatcggaggtccacgcggttatacaattcctgtagcatctcttggcaagggcgttgcctgtaacccagcttgcttcatcactcagcttctgccggtgaagagaaaactgggtttctacgaagctaccagcaggctccgatcccacatcaaccctacaggaaccgtcctcttgcagctggagaatacgatgcagacttcactgaaggacctcctg

SEQ ID NO: 898 - protein, 398 aa, Artificial Sequence
  variant of human alpha-galactosidase A
LDNGLARTPPMGWLHWERFMCNLDCQEEPDSCISEKLFEEMAERMVTDGWKDAGYEYLCIDDCWMAPQRDSEGRLQADPQRFPHGIRQLANHVHSKGLKLGIYADVGNKTCAGFPGSFGYYDIDAQTFADWGVDLLKFDGCYCDSLENLADGYKHMSLALNKTGRPIVYSCEWPLYMWPFQKPNYTEIRQYCNHWRNFADIDDSWASIKSILDWTSRNQERIVDVAGPGGWNDPDMLVIGNFGLSWDQQVTQMALWAIMAGPLFMSNDLRAISPQAQALLQDKDVIAINQDPLGKQGYQLRKGDNFEVWERPLSGDAWAVAIINRQEIGGPRGYTIPVASLGKGVACNPACFITQLLPVKRKLGFYEATSRLRSHINPTGTVLLQLENTMQTSLKDLL

SEQ ID NO: 899 - DNA, 1194 bp, Artificial Sequence
  variant of human alpha-galactosidase A
ctggataatggattggctagaacacctcctatggggtggcttcactgggagaggttcatgtgcaacctggactgtcaggaagaaccagacagctgcatctccgagaagctctttgaggaaatggccgaacgaatggtgactgacggctggaaagatgcaggttacgagtatctgtgtattgacgattgctggatggccccacaacgggattctgagggaagacttcaggctgatccgcagcgcttccctcatggcataaggcagctggcaaaccacgtccacagtaaggggctcaaattgggaatctacgcggacgtgggcaataagacctgtgccggttttccgggatcattcgggtattatgacattgacgcccaaacgtttgctgattggggcgttgacctgctgaaattcgatggttgctactgtgacagcctcgaaaacctggcagacggctacaagcatatgtctctcgccctgaataaaaccggtcggccaatcgtatattcctgcgagtggcctctttacatgtggccatttcagaaaccgaactacacagaaattcgccagtattgcaatcattggaggaacttcgctgatatcgatgactcatgggcctccataaagagcatcttggactggaccagtcggaatcaggagcgaattgtggatgtcgcaggccctggaggatggaacgatccagacatgctggtgatcggcaattttggcctctcttgggaccagcaggttacccaaatggctctgtgggcaattatggccggtcctcttttcatgagcaacgatctgcgcgcgatctcaccacaggcagtggccctgctccaagacaaagatgtgatagccatcaatcaggacccgttgggaaagcagggctaccagctgagaaaaggcgacaactttgaggtctgggaaaggcctttgagtggagatgcgtgggctgtggccattattaatcggcaagagatcggaggtccacgcggttatacaattcctgtagcatctcttggcaagggcgttgcctgtaacccagcttgcttcatcactcagcttctgccggtgaagagaaaactgggtttctacgaagctaccagcaggctccgatcccacatcaaccctacaggaaccgtcctcttgcagctggagaatacgatgcagacttcactgaaggacctcctg

SEQ ID NO: 900 - protein, 398 aa, Artificial Sequence
  variant of human alpha-galactosidase A
LDNGLARTPPMGWLHWERFMCNLDCQEEPDSCISEKLFEEMAERMVTDGWKDAGYEYLCIDDCWMAPQRDSEGRLQADPQRFPHGIRQLANHVHSKGLKLGIYADVGNKTCAGFPGSFGYYDIDAQTFADWGVDLLKFDGCYCDSLENLADGYKHMSLALNKTGRPIVYSCEWPLYMWPFQKPNYTEIRQYCNHWRNFADIDDSWASIKSILDWTSRNQERIVDVAGPGGWNDPDMLVIGNFGLSWDQQVTQMALWAIMAGPLFMSNDLRAISPQAVALLQDKDVIAINQDPLGKQGYQLRKGDNFEVWERPLSGDAWAVAIINRQEIGGPRGYTIPVASLGKGVACNPACFITQLLPVKRKLGFYEATSRLRSHINPTGTVLLQLENTMQTSLKDLL

SEQ ID NO: 901 - DNA, 1194 bp, Artificial Sequence
  variant of human alpha-galactosidase A
ctggataatggattggctagaacacctcctatggggtggcttcactgggagaggttcatgtgcaacctggactgtcaggaagaaccagacagctgcatctccgagaagctctttgaggaaatggccgaacgaatggtgactgacggctggaaagatgcaggttacgagtatctgtgtattgacgattgctggatggccccacaacgggattctgagggaagacttcaggctgatccgcagcgcttccctcatggcataaggcagctggcaaaccacgtccacagtaaggggctcaaattgggaatctacgcggacgtgggcaataagacctgtgccggttttccgggatcattcgggtattatgacattgacgcccaaacgtttgctgattggggcgttgacctgctgaaattcgatggttgctactgtgacagcctcgaaaacctggcagacggctacaagcatatgtctctcgccctgaataaaaccggtcggccaatcgtatattcctgcgagtggcctctttacatgtggccatttcagaaaccgaactacacagaaattcgccagtattgcaatcattggaggaacttcgctgatatcgatgactcatgggcctccataaagagcatcttggactggaccagtcggaatcaggagcgaattgtggatgtcgcaggccctggaggatggaacgatccagacatgctggtgatcggcaattttggcctctcttgggaccagcaggttacccaaatggctctgtgggcaattatggccggtcctcttttcatgagcaacgatctgcgcgcgatctcaccacaggcaaaggccctgctccaagaccttgatgtgatagccatcaatcaggacccgttgggaaagcagggctaccagctgagaaaaggcgacaactttgaggtctgggaaaggcctttgagtggagatgcgtgggctgtggccattattaatcggcaagagatcggaggtccacgcggttatacaattcctgtagcatctcttggcaagggcgttgcctgtaacccagcttgcttcatcactcagcttctgccggtgaagagaaaactgggtttctacgaagctaccagcaggctccgatcccacatcaaccctacaggaaccgtcctcttgcagctggagaatacgatgcagacttcactgaaggacctcctg

SEQ ID NO: 902 - protein, 398 aa, Artificial Sequence
  variant of human alpha-galactosidase A
LDNGLARTPPMGWLHWERFMCNLDCQEEPDSCISEKLFEEMAERMVTDGWKDAGYEYLCIDDCWMAPQRDSEGRLQADPQRFPHGIRQLANHVHSKGLKLGIYADVGNKTCAGFPGSFGYYDIDAQTFADWGVDLLKFDGCYCDSLENLADGYKHMSLALNKTGRPIVYSCEWPLYMWPFQKPNYTEIRQYCNHWRNFADIDDSWASIKSILDWTSRNQERIVDVAGPGGWNDPDMLVIGNFGLSWDQQVTQMALWAIMAGPLFMSNDLRAISPQAKALLQDLDVIAINQDPLGKQGYQLRKGDNFEVWERPLSGDAWAVAIINRQEIGGPRGYTIPVASLGKGVACNPACFITQLLPVKRKLGFYEATSRLRSHINPTGTVLLQLENTMQTSLKDLL

SEQ ID NO: 903 - DNA, 1194 bp, Artificial Sequence
  variant of human alpha-galactosidase A
ctggataatggattggctagaacacctcctatggggtggcttcactgggagaggttcatgtgcaacctggactgtcaggaagaaccagacagctgcatctccgagaagctctttgaggaaatggccgaacgaatggtgactgacggctggaaagatgcaggttacgagtatctgtgtattgacgattgctggatggccccacaacgggattctgagggaagacttcaggctgatccgcagcgcttccctcatggcataaggcagctggcaaaccacgtccacagtaaggggctcaaattgggaatctacgcggacgtgggcaataagacctgtgccggttttccgggatcattcgggtattatgacattgacgcccaaacgtttgctgattggggcgttgacctgctgaaattcgatggttgctactgtgacagcctcgaaaacctggcagacggctacaagcatatgtctctcgccctgaataaaaccggtcggccaatcgtatattcctgcgagtggcctctttacatgtggccatttcagaaaccgaactacacagaaattcgccagtattgcaatcattggaggaacttcgctgatatcgatgactcatgggcctccataaagagcatcttggactggaccagtcggaatcaggagcgaattgtggatgtcgcaggccctggaggatggaacgatccagacatgctggtgatcggcaattttggcctctcttgggaccagcaggttacccaaatggctctgtgggcaattatggccggtcctcttttcatgagcaacgatctgcgcgcgatctcaccacaggcaaaggccctgctccaagaccctgatgtgatagccatcaatcaggacccgttgggaaagcagggctaccagctgagaaaaggcgacaactttgaggtctgggaaaggcctttgagtggagatgcgtgggctgtggccattattaatcggcaagagatcggaggtccacgcggttatacaattcctgtagcatctcttggcaagggcgttgcctgtaacccagcttgcttcatcactcagcttctgccggtgaagagaaaactgggtttctacgaagctaccagcaggctccgatcccacatcaaccctacaggaaccgtcctcttgcagctggagaatacgatgcagacttcactgaaggacctcctg

SEQ ID NO: 904 - protein, 398 aa, Artificial Sequence
  variant of human alpha-galactosidase A
LDNGLARTPPMGWLHWERFMCNLDCQEEPDSCISEKLFEEMAERMVTDGWKDAGYEYLCIDDCWMAPQRDSEGRLQADPQRFPHGIRQLANHVHSKGLKLGIYADVGNKTCAGFPGSFGYYDIDAQTFADWGVDLLKFDGCYCDSLENLADGYKHMSLALNKTGRPIVYSCEWPLYMWPFQKPNYTEIRQYCNHWRNFADIDDSWASIKSILDWTSRNQERIVDVAGPGGWNDPDMLVIGNFGLSWDQQVTQMALWAIMAGPLFMSNDLRAISPQAKALLQDPDVIAINQDPLGKQGYQLRKGDNFEVWERPLSGDAWAVAIINRQEIGGPRGYTIPVASLGKGVACNPACFITQLLPVKRKLGFYEATSRLRSHINPTGTVLLQLENTMQTSLKDLL

SEQ ID NO: 905 - DNA, 1194 bp, Artificial Sequence
  variant of human alpha-galactosidase A
ctggataatggattggctagaacacctcctatggggtggcttcactgggagaggttcatgtgcaacctggactgtcaggaagaaccagacagctgcatctccgagaagctctttgaggaaatggccgaacgaatggtgactgacggctggaaagatgcaggttacgagtatctgtgtattgacgattgctggatggccccacaacgggattctgagggaagacttcaggctgatccgcagcgcttccctcatggcataaggcagctggcaaaccacgtccacagtaaggggctcaaattgggaatctacgcggacgtgggcaataagacctgtgccggttttccgggatcattcgggtattatgacattgacgcccaaacgtttgctgattggggcgttgacctgctgaaattcgatggttgctactgtgacagcctcgaaaacctggcagacggctacaagcatatgtctctcgccctgaataaaaccggtcggccaatcgtatattcctgcgagtggcctctttacatgtggccatttcagaaaccgaactacacagaaattcgccagtattgcaatcattggaggaacttcgctgatatcgatgactcatgggcctccataaagagcatcttggactggaccagtcggaatcaggagcgaattgtggatgtcgcaggccctggaggatggaacgatccagacatgctggtgatcggcaattttggcctctcttgggaccagcaggttacccaaatggctctgtgggcaattatggccggtcctcttttcatgagcaacgatctgcgcgcgatctcaccacaggcaaaggccctgctccaagacactgatgtgatagccatcaatcaggacccgttgggaaagcagggctaccagctgagaaaaggcgacaactttgaggtctgggaaaggcctttgagtggagatgcgtgggctgtggccattattaatcggcaagagatcggaggtccacgcggttatacaattcctgtagcatctcttggcaagggcgttgcctgtaacccagcttgcttcatcactcagcttctgccggtgaagagaaaactgggtttctacgaagctaccagcaggctccgatcccacatcaaccctacaggaaccgtcctcttgcagctggagaatacgatgcagacttcactgaaggacctcctg

SEQ ID NO: 906 - protein, 398 aa, Artificial Sequence
  variant of human alpha-galactosidase A
LDNGLARTPPMGWLHWERFMCNLDCQEEPDSCISEKLFEEMAERMVTDGWKDAGYEYLCIDDCWMAPQRDSEGRLQADPQRFPHGIRQLANHVHSKGLKLGIYADVGNKTCAGFPGSFGYYDIDAQTFADWGVDLLKFDGCYCDSLENLADGYKHMSLALNKTGRPIVYSCEWPLYMWPFQKPNYTEIRQYCNHWRNFADIDDSWASIKSILDWTSRNQERIVDVAGPGGWNDPDMLVIGNFGLSWDQQVTQMALWAIMAGPLFMSNDLRAISPQAKALLQDTDVIAINQDPLGKQGYQLRKGDNFEVWERPLSGDAWAVAIINRQEIGGPRGYTIPVASLGKGVACNPACFITQLLPVKRKLGFYEATSRLRSHINPTGTVLLQLENTMQTSLKDLL

SEQ ID NO: 907 - DNA, 1194 bp, Artificial Sequence
  variant of human alpha-galactosidase A
ctggataatggattggctagaacacctcctatggggtggcttcactgggagaggttcatgtgcaacctggactgtcaggaagaaccagacagctgcatctccgagaagctctttgaggaaatggccgaacgaatggtgactgacggctggaaagatgcaggttacgagtatctgtgtattgacgattgctggatggccccacaacgggattctgagggaagacttcaggctgatccgcagcgcttccctcatggcataaggcagctggcaaaccacgtccacagtaaggggctcaaattgggaatctacgcggacgtgggcaataagacctgtgccggttttccgggatcattcgggtattatgacattgacgcccaaacgtttgctgattggggcgttgacctgctgaaattcgatggttgctactgtgacagcctcgaaaacctggcagacggctacaagcatatgtctctcgccctgaataaaaccggtcggccaatcgtatattcctgcgagtggcctctttacatgtggccatttcagaaaccgaactacacagaaattcgccagtattgcaatcattggaggaacttcgctgatatcgatgactcatgggcctccataaagagcatcttggactggaccagtcggaatcaggagcgaattgtggatgtcgcaggccctggaggatggaacgatccagacatgctggtgatcggcaattttggcctctcttgggaccagcaggttacccaaatggctctgtgggcaattatggccggtcctcttttcatgagcaacgatctgcgcgcgatctcaccacaggcaaaggccctgctccaagacgtggatgtgatagccatcaatcaggacccgttgggaaagcagggctaccagctgagaaaaggcgacaactttgaggtctgggaaaggcctttgagtggagatgcgtgggctgtggccattattaatcggcaagagatcggaggtccacgcggttatacaattcctgtagcatctcttggcaagggcgttgcctgtaacccagcttgcttcatcactcagcttctgccggtgaagagaaaactgggtttctacgaagctaccagcaggctccgatcccacatcaaccctacaggaaccgtcctcttgcagctggagaatacgatgcagacttcactgaaggacctcctg

SEQ ID NO: 908 - protein, 398 aa, Artificial Sequence
  variant of human alpha-galactosidase A
LDNGLARTPPMGWLHWERFMCNLDCQEEPDSCISEKLFEEMAERMVTDGWKDAGYEYLCIDDCWMAPQRDSEGRLQADPQRFPHGIRQLANHVHSKGLKLGIYADVGNKTCAGFPGSFGYYDIDAQTFADWGVDLLKFDGCYCDSLENLADGYKHMSLALNKTGRPIVYSCEWPLYMWPFQKPNYTEIRQYCNHWRNFADIDDSWASIKSILDWTSRNQERIVDVAGPGGWNDPDMLVIGNFGLSWDQQVTQMALWAIMAGPLFMSNDLRAISPQAKALLQDVDVIAINQDPLGKQGYQLRKGDNFEVWERPLSGDAWAVAIINRQEIGGPRGYTIPVASLGKGVACNPACFITQLLPVKRKLGFYEATSRLRSHINPTGTVLLQLENTMQTSLKDLL

SEQ ID NO: 909 - DNA, 1194 bp, Artificial Sequence
  variant of human alpha-galactosidase A
ctggataatggattggctagaacacctcctatggggtggcttcactgggagaggttcatgtgcaacctggactgtcaggaagaaccagacagctgcatctccgagaagctctttgaggaaatggccgaacgaatggtgactgacggctggaaagatgcaggttacgagtatctgtgtattgacgattgctggatggccccacaacgggattctgagggaagacttcaggctgatccgcagcgcttccctcatggcataaggcagctggcaaaccacgtccacagtaaggggctcaaattgggaatctacgcggacgtgggcaataagacctgtgccggttttccgggatcattcgggtattatgacattgacgcccaaacgtttgctgattggggcgttgacctgctgaaattcgatggttgctactgtgacagcctcgaaaacctggcagacggctacaagcatatgtctctcgccctgaataaaaccggtcggccaatcgtatattcctgcgagtggcctctttacatgtggccatttcagaaaccgaactacacagaaattcgccagtattgcaatcattggaggaacttcgctgatatcgatgactcatgggcctccataaagagcatcttggactggaccagtcggaatcaggagcgaattgtggatgtcgcaggccctggaggatggaacgatccagacatgctggtgatcggcaattttggcctctcttgggaccagcaggttacccaaatggctctgtgggcaattatggccggtcctcttttcatgagcaacgatctgcgcgcgatctcaccacaggcaaaggccctgctccaagacaaagatgtgatagccatcaatcaggacccgttgggaaagcagggctaccagctgagaaaaggcgacaactttgaggtctgggaaaggcctttgagtggagatgcgtgggctgtggccattattaatcggcaagagatcggaggtccacgcggttatacaattcctgtagcatctcttggccttggcgttgcctgtaacccagcttgcttcatcactcagcttctgccggtgaagagaaaactgggtttctacgaagctaccagcaggctccgatcccacatcaaccctacaggaaccgtcctcttgcagctggagaatacgatgcagacttcactgaaggacctcctg

SEQ ID NO: 910 - protein, 398 aa, Artificial Sequence
  variant of human alpha-galactosidase A
LDNGLARTPPMGWLHWERFMCNLDCQEEPDSCISEKLFEEMAERMVTDGWKDAGYEYLCIDDCWMAPQRDSEGRLQADPQRFPHGIRQLANHVHSKGLKLGIYADVGNKTCAGFPGSFGYYDIDAQTFADWGVDLLKFDGCYCDSLENLADGYKHMSLALNKTGRPIVYSCEWPLYMWPFQKPNYTEIRQYCNHWRNFADIDDSWASIKSILDWTSRNQERIVDVAGPGGWNDPDMLVIGNFGLSWDQQVTQMALWAIMAGPLFMSNDLRAISPQAKALLQDKDVIAINQDPLGKQGYQLRKGDNFEVWERPLSGDAWAVAIINRQEIGGPRGYTIPVASLGLGVACNPACFITQLLPVKRKLGFYEATSRLRSHINPTGTVLLQLENTMQTSLKDLL

SEQ ID NO: 911 - DNA, 1194 bp, Artificial Sequence
  variant of human alpha-galactosidase A
ctggataatggattggctagaacacctcctatggggtggcttcactgggagaggttcatgtgcaacctggactgtcaggaagaaccagacagctgcatctccgagaagctctttgaggaaatggccgaacgaatggtgactgacggctggaaagatgcaggttacgagtatctgtgtattgacgattgctggatggccccacaacgggattctgagggaagacttcaggctgatccgcagcgcttccctcatggcataaggcagctggcaaaccacgtccacagtaaggggctcaaattgggaatctacgcggacgtgggcaataagacctgtgccggttttccgggatcattcgggtattatgacattgacgcccaaacgtttgctgattggggcgttgacctgctgaaattcgatggttgctactgtgacagcctcgaaaacctggcagacggctacaagcatatgtctctcgccctgaataaaaccggtcggccaatcgtatattcctgcgagtggcctctttacatgtggccatttcagaaaccgaactacacagaaattcgccagtattgcaatcattggaggaacttcgctgatatcgatgactcatgggcctccataaagagcatcttggactggaccagtcggaatcaggagcgaattgtggatgtcgcaggccctggaggatggaacgatccagacatgctggtgatcggcaattttggcctctcttgggaccagcaggttacccaaatggctctgtgggcaattatggccggtcctcttttcatgagcaacgatctgcgcgcgatctcaccacaggcaaaggccctgctccaagacaaagatgtgatagccatcaatcaggacccgttgggaaagcagggctaccagctgagaaaaggcgacaactttgaggtctgggaaaggcctttgagtggagatgcgtgggctgtggccattattaatcggcaagagatcggaggtccacgcggttatacaattcctgtagcatctcttggccggggcgttgcctgtaacccagcttgcttcatcactcagcttctgccggtgaagagaaaactgggtttctacgaagctaccagcaggctccgatcccacatcaaccctacaggaaccgtcctcttgcagctggagaatacgatgcagacttcactgaaggacctcctg

SEQ ID NO: 912 - protein, 398 aa, Artificial Sequence
  variant of human alpha-galactosidase A
LDNGLARTPPMGWLHWERFMCNLDCQEEPDSCISEKLFEEMAERMVTDGWKDAGYEYLCIDDCWMAPQRDSEGRLQADPQRFPHGIRQLANHVHSKGLKLGIYADVGNKTCAGFPGSFGYYDIDAQTFADWGVDLLKFDGCYCDSLENLADGYKHMSLALNKTGRPIVYSCEWPLYMWPFQKPNYTEIRQYCNHWRNFADIDDSWASIKSILDWTSRNQERIVDVAGPGGWNDPDMLVIGNFGLSWDQQVTQMALWAIMAGPLFMSNDLRAISPQAKALLQDKDVIAINQDPLGKQGYQLRKGDNFEVWERPLSGDAWAVAIINRQEIGGPRGYTIPVASLGRGVACNPACFITQLLPVKRKLGFYEATSRLRSHINPTGTVLLQLENTMQTSLKDLL

SEQ ID NO: 913 - DNA, 1194 bp, Artificial Sequence
  variant of human alpha-galactosidase A
ctggataatggattggctagaacacctcctatggggtggcttcactgggagaggttcatgtgcaacctggactgtcaggaagaaccagacagctgcatctccgagaagctctttgaggaaatggccgaacgaatggtgactgacggctggaaagatgcaggttacgagtatctgtgtattgacgattgctggatggccccacaacgggattctgagggaagacttcaggctgatccgcagcgcttccctcatggcataaggcagctggcaaaccacgtccacagtaaggggctcaaattgggaatctacgcggacgtgggcaataagacctgtgccggttttccgggatcattcgggtattatgacattgacgcccaaacgtttgctgattggggcgttgacctgctgaaattcgatggttgctactgtgacagcctcgaaaacctggcagacggctacaagcatatgtctctcgccctgaataaaaccggtcggccaatcgtatattcctgcgagtggcctctttacatgtggccatttcagaaaccgaactacacagaaattcgccagtattgcaatcattggaggaacttcgctgatatcgatgactcatgggcctccataaagagcatcttggactggaccagtcggaatcaggagcgaattgtggatgtcgcaggccctggaggatggaacgatccagacatgctggtgatcggcaattttggcctctcttgggaccagcaggttacccaaatggctctgtgggcaattatggccggtcctcttttcatgagcaacgatctgcgcgcgatctcaccacaggcaaaggccctgctccaagacaaagatgtgatagccatcaatcaggacccgttgggaaagcagggctaccagctgagaaaaggcgacaactttgaggtctgggaaaggcctttgagtggagatgcgtgggctgtggccattattaatcggcaagagatcggaggtccacgcggttatacaattcctgtagcatctcttggcagtggcgttgcctgtaacccagcttgcttcatcactcagcttctgccggtgaagagaaaactgggtttctacgaagctaccagcaggctccgatcccacatcaaccctacaggaaccgtcctcttgcagctggagaatacgatgcagacttcactgaaggacctcctg

SEQ ID NO: 914 - protein, 398 aa, Artificial Sequence
  variant of human alpha-galactosidase A
LDNGLARTPPMGWLHWERFMCNLDCQEEPDSCISEKLFEEMAERMVTDGWKDAGYEYLCIDDCWMAPQRDSEGRLQADPQRFPHGIRQLANHVHSKGLKLGIYADVGNKTCAGFPGSFGYYDIDAQTFADWGVDLLKFDGCYCDSLENLADGYKHMSLALNKTGRPIVYSCEWPLYMWPFQKPNYTEIRQYCNHWRNFADIDDSWASIKSILDWTSRNQERIVDVAGPGGWNDPDMLVIGNFGLSWDQQVTQMALWAIMAGPLFMSNDLRAISPQAKALLQDKDVIAINQDPLGKQGYQLRKGDNFEVWERPLSGDAWAVAIINRQEIGGPRGYTIPVASLGSGVACNPACFITQLLPVKRKLGFYEATSRLRSHINPTGTVLLQLENTMQTSLKDLL

SEQ ID NO: 915 - DNA, 1194 bp, Artificial Sequence
  variant of human alpha-galactosidase A
ctggataatggattggctagaacacctcctatggggtggcttcactgggagaggttcatgtgcaacctggactgtcaggaagaaccagacagctgcatctccgagaagctctttgaggaaatggccgaacgaatggtgactgacggctggaaagatgcaggttacgagtatctgtgtattgacgattgctggatggccccacaacgggattctgagggaagacttcaggctgatccgcagcgcttccctcatggcataaggcagctggcaaaccacgtccacagtaaggggctcaaattgggaatctacgcggacgtgggcaataagacctgtgccggttttccgggatcattcgggtattatgacattgacgcccaaacgtttgctgattggggcgttgacctgctgaaattcgatggttgctactgtgacagcctcgaaaacctggcagacggctacaagcatatgtctctcgccctgaataaaaccggtcggccaatcgtatattcctgcgagtggcctctttacatgtggccatttcagaaaccgaactacacagaaattcgccagtattgcaatcattggaggaacttcgctgatatcgatgactcatgggcctccataaagagcatcttggactggaccagtcggaatcaggagcgaattgtggatgtcgcaggccctggaggatggaacgatccagacatgctggtgatcggcaattttggcctctcttgggaccagcaggttacccaaatggctctgtgggcaattatggccggtcctcttttcatgagcaacgatctgcgcgcgatctcaccacaggcaaaggccctgctccaagacaaagatgtgatagccatcaatcaggacccgttgggaaagcagggctaccagctgagaaaaggcgacaactttgaggtctgggaaaggcctttgagtggagatgcgtgggctgtggccattattaatcggcaagagatcggaggtccacgcggttatacaattcctgtagcatctcttggctggggcgttgcctgtaacccagcttgcttcatcactcagcttctgccggtgaagagaaaactgggtttctacgaagctaccagcaggctccgatcccacatcaaccctacaggaaccgtcctcttgcagctggagaatacgatgcagacttcactgaaggacctcctg

SEQ ID NO: 916 - protein, 398 aa, Artificial Sequence
  variant of human alpha-galactosidase A
LDNGLARTPPMGWLHWERFMCNLDCQEEPDSCISEKLFEEMAERMVTDGWKDAGYEYLCIDDCWMAPQRDSEGRLQADPQRFPHGIRQLANHVHSKGLKLGIYADVGNKTCAGFPGSFGYYDIDAQTFADWGVDLLKFDGCYCDSLENLADGYKHMSLALNKTGRPIVYSCEWPLYMWPFQKPNYTEIRQYCNHWRNFADIDDSWASIKSILDWTSRNQERIVDVAGPGGWNDPDMLVIGNFGLSWDQQVTQMALWAIMAGPLFMSNDLRAISPQAKALLQDKDVIAINQDPLGKQGYQLRKGDNFEVWERPLSGDAWAVAIINRQEIGGPRGYTIPVASLGWGVACNPACFITQLLPVKRKLGFYEATSRLRSHINPTGTVLLQLENTMQTSLKDLL

SEQ ID NO: 917 - DNA, 1194 bp, Artificial Sequence
  variant of human alpha-galactosidase A
ctggataatggattggctagaacacctcctatggggtggcttcactgggagaggttcatgtgcaacctggactgtcaggaagaaccagacagctgcatctccgagaagctctttgaggaaatggccgaacgaatggtgactgacggctggaaagatgcaggttacgagtatctgtgtattgacgattgctggatggccccacaacgggattctgagggaagacttcaggctgatccgcagcgcttccctcatggcataaggcagctggcaaaccacgtccacagtaaggggctcaaattgggaatctacgcggacgtgggcaataagacctgtgccggttttccgggatcattcgggtattatgacattgacgcccaaacgtttgctgattggggcgttgacctgctgaaattcgatggttgctactgtgacagcctcgaaaacctggcagacggctacaagcatatgtctctcgccctgaataaaaccggtcggccaatcgtatattcctgcgagtggcctctttacatgtggccatttcagaaaccgaactacacagaaattcgccagtattgcaatcattggaggaacttcgctgatatcgatgactcatgggcctccataaagagcatcttggactggaccagtcggaatcaggagcgaattgtggatgtcgcaggccctggaggatggaacgatccagacatgctggtgatcggcaattttggcctctcttgggaccagcaggttacccaaatggctctgtgggcaattatggccggtcctcttttcatgagcaacgatctgcgcgcgatctcaccacaggcaaaggccctgctccaagacaaagatgtgatagccatcaatcaggacccgttgggaaagcagggctaccagctgagaaaaggcgacaactttgaggtctgggaaaggcctttgagtggagatgcgtgggctgtggccattattaatcggcaagagatcggaggtccacgcggttatacaattcctgtagcatctcttggcaagggcgttgcctgtaacccagcttgcttcatcactcagcttctgccggtgcatagaaaactgggtttctacgaagctaccagcaggctccgatcccacatcaaccctacaggaaccgtcctcttgcagctggagaatacgatgcagacttcactgaaggacctcctg

SEQ ID NO: 918 - protein, 398 aa, Artificial Sequence
  variant of human alpha-galactosidase A
LDNGLARTPPMGWLHWERFMCNLDCQEEPDSCISEKLFEEMAERMVTDGWKDAGYEYLCIDDCWMAPQRDSEGRLQADPQRFPHGIRQLANHVHSKGLKLGIYADVGNKTCAGFPGSFGYYDIDAQTFADWGVDLLKFDGCYCDSLENLADGYKHMSLALNKTGRPIVYSCEWPLYMWPFQKPNYTEIRQYCNHWRNFADIDDSWASIKSILDWTSRNQERIVDVAGPGGWNDPDMLVIGNFGLSWDQQVTQMALWAIMAGPLFMSNDLRAISPQAKALLQDKDVIAINQDPLGKQGYQLRKGDNFEVWERPLSGDAWAVAIINRQEIGGPRGYTIPVASLGKGVACNPACFITQLLPVHRKLGFYEATSRLRSHINPTGTVLLQLENTMQTSLKDLL

SEQ ID NO: 919 - DNA, 1194 bp, Artificial Sequence
  variant of human alpha-galactosidase A
ctggataatggattggctagaacacctcctatggggtggcttcactgggagaggttcatgtgcaacctggactgtcaggaagaaccagacagctgcatctccgagaagctctttgaggaaatggccgaacgaatggtgactgacggctggaaagatgcaggttacgagtatctgtgtattgacgattgctggatggccccacaacgggattctgagggaagacttcaggctgatccgcagcgcttccctcatggcataaggcagctggcaaaccacgtccacagtaaggggctcaaattgggaatctacgcggacgtgggcaataagacctgtgccggttttccgggatcattcgggtattatgacattgacgcccaaacgtttgctgattggggcgttgacctgctgaaattcgatggttgctactgtgacagcctcgaaaacctggcagacggctacaagcatatgtctctcgccctgaataaaaccggtcggccaatcgtatattcctgcgagtggcctctttacatgtggccatttcagaaaccgaactacacagaaattcgccagtattgcaatcattggaggaacttcgctgatatcgatgactcatgggcctccataaagagcatcttggactggaccagtcggaatcaggagcgaattgtggatgtcgcaggccctggaggatggaacgatccagacatgctggtgatcggcaattttggcctctcttgggaccagcaggttacccaaatggctctgtgggcaattatggccggtcctcttttcatgagcaacgatctgcgcgcgatctcaccacaggcaaaggccctgctccaagacaaagatgtgatagccatcaatcaggacccgttgggaaagcagggctaccagctgagaaaaggcgacaactttgaggtctgggaaaggcctttgagtggagatgcgtgggctgtggccattattaatcggcaagagatcggaggtccacgcggttatacaattcctgtagcatctcttggcaagggcgttgcctgtaacccagcttgcttcatcactcagcttctgccggtggttagaaaactgggtttctacgaagctaccagcaggctccgatcccacatcaaccctacaggaaccgtcctcttgcagctggagaatacgatgcagacttcactgaaggacctcctg

SEQ ID NO: 920 - protein, 398 aa, Artificial Sequence
  variant of human alpha-galactosidase A
LDNGLARTPPMGWLHWERFMCNLDCQEEPDSCISEKLFEEMAERMVTDGWKDAGYEYLCIDDCWMAPQRDSEGRLQADPQRFPHGIRQLANHVHSKGLKLGIYADVGNKTCAGFPGSFGYYDIDAQTFADWGVDLLKFDGCYCDSLENLADGYKHMSLALNKTGRPIVYSCEWPLYMWPFQKPNYTEIRQYCNHWRNFADIDDSWASIKSILDWTSRNQERIVDVAGPGGWNDPDMLVIGNFGLSWDQQVTQMALWAIMAGPLFMSNDLRAISPQAKALLQDKDVIAINQDPLGKQGYQLRKGDNFEVWERPLSGDAWAVAIINRQEIGGPRGYTIPVASLGKGVACNPACFITQLLPVVRKLGFYEATSRLRSHINPTGTVLLQLENTMQTSLKDLL

SEQ ID NO: 921 - DNA, 1194 bp, Artificial Sequence
  variant of human alpha-galactosidase A
ctggataatggattggctagaacacctcctatggggtggcttcactgggagaggttcatgtgcaacctggactgtcaggaagaaccagacagctgcatctccgagaagctctttgaggaaatggccgaacgaatggtgactgacggctggaaagatgcaggttacgagtatctgtgtattgacgattgctggatggccccacaacgggattctgagggaagacttcaggctgatccgcagcgcttccctcatggcataaggcagctggcaaaccacgtccacagtaaggggctcaaattgggaatctacgcggacgtgggcaataagacctgtgccggttttccgggatcattcgggtattatgacattgacgcccaaacgtttgctgattggggcgttgacctgctgaaattcgatggttgctactgtgacagcctcgaaaacctggcagacggctacaagcatatgtctctcgccctgaataaaaccggtcggccaatcgtatattcctgcgagtggcctctttacatgtggccatttcagaaaccgaactacacagaaattcgccagtattgcaatcattggaggaacttcgctgatatcgatgactcatgggcctccataaagagcatcttggactggaccagtcggaatcaggagcgaattgtggatgtcgcaggccctggaggatggaacgatccagacatgctggtgatcggcaattttggcctctcttgggaccagcaggttacccaaatggctctgtgggcaattatggccggtcctcttttcatgagcaacgatctgcgcgcgatctcaccacaggcaaaggccctgctccaagacaaagatgtgatagccatcaatcaggacccgttgggaaagcagggctaccagctgagaaaaggcgacaactttgaggtctgggaaaggcctttgagtggagatgcgtgggctgtggccattattaatcggcaagagatcggaggtccacgcggttatacaattcctgtagcatctcttggcaagggcgttgcctgtaacccagcttgcttcatcactcagcttctgccggtgaagagacatctgggtttctacgaagctaccagcaggctccgatcccacatcaaccctacaggaaccgtcctcttgcagctggagaatacgatgcagacttcactgaaggacctcctg

SEQ ID NO: 922 - protein, 398 aa, Artificial Sequence
  variant of human alpha-galactosidase A
LDNGLARTPPMGWLHWERFMCNLDCQEEPDSCISEKLFEEMAERMVTDGWKDAGYEYLCIDDCWMAPQRDSEGRLQADPQRFPHGIRQLANHVHSKGLKLGIYADVGNKTCAGFPGSFGYYDIDAQTFADWGVDLLKFDGCYCDSLENLADGYKHMSLALNKTGRPIVYSCEWPLYMWPFQKPNYTEIRQYCNHWRNFADIDDSWASIKSILDWTSRNQERIVDVAGPGGWNDPDMLVIGNFGLSWDQQVTQMALWAIMAGPLFMSNDLRAISPQAKALLQDKDVIAINQDPLGKQGYQLRKGDNFEVWERPLSGDAWAVAIINRQEIGGPRGYTIPVASLGKGVACNPACFITQLLPVKRHLGFYEATSRLRSHINPTGTVLLQLENTMQTSLKDLL

SEQ ID NO: 923 - DNA, 1194 bp, Artificial Sequence
  variant of human alpha-galactosidase A
ctggataatggattggctagaacacctcctatggggtggcttcactgggagaggttcatgtgcaacctggactgtcaggaagaaccagacagctgcatctccgagaagctctttgaggaaatggccgaacgaatggtgactgacggctggaaagatgcaggttacgagtatctgtgtattgacgattgctggatggccccacaacgggattctgagggaagacttcaggctgatccgcagcgcttccctcatggcataaggcagctggcaaaccacgtccacagtaaggggctcaaattgggaatctacgcggacgtgggcaataagacctgtgccggttttccgggatcattcgggtattatgacattgacgcccaaacgtttgctgattggggcgttgacctgctgaaattcgatggttgctactgtgacagcctcgaaaacctggcagacggctacaagcatatgtctctcgccctgaataaaaccggtcggccaatcgtatattcctgcgagtggcctctttacatgtggccatttcagaaaccgaactacacagaaattcgccagtattgcaatcattggaggaacttcgctgatatcgatgactcatgggcctccataaagagcatcttggactggaccagtcggaatcaggagcgaattgtggatgtcgcaggccctggaggatggaacgatccagacatgctggtgatcggcaattttggcctctcttgggaccagcaggttacccaaatggctctgtgggcaattatggccggtcctcttttcatgagcaacgatctgcgcgcgatctcaccacaggcaaaggccctgggtcaagacaaagatgtgatagccatcaatcaggacccgttgggaaagcagggctaccagctgagaaaaggcgacaactttgaggtctgggaaaggcctttgagtggagatgcgtgggctgtggccattattaatcggcaagagatcggaggtccacgcggttatacaattcctgtagcatctcttggcaagggcgttgcctgtaacccagcttgcttcatcactcagcttctgccggtgaagagaaaactgggtttctacgaagctaccagcaggctccgatcccacatcaaccctacaggaaccgtcctcttgcagctggagaatacgatgcagacttcactgaaggacctcctg

SEQ ID NO: 924 - protein, 398 aa, Artificial Sequence
  variant of human alpha-galactosidase A
LDNGLARTPPMGWLHWERFMCNLDCQEEPDSCISEKLFEEMAERMVTDGWKDAGYEYLCIDDCWMAPQRDSEGRLQADPQRFPHGIRQLANHVHSKGLKLGIYADVGNKTCAGFPGSFGYYDIDAQTFADWGVDLLKFDGCYCDSLENLADGYKHMSLALNKTGRPIVYSCEWPLYMWPFQKPNYTEIRQYCNHWRNFADIDDSWASIKSILDWTSRNQERIVDVAGPGGWNDPDMLVIGNFGLSWDQQVTQMALWAIMAGPLFMSNDLRAISPQAKALGQDKDVIAINQDPLGKQGYQLRKGDNFEVWERPLSGDAWAVAIINRQEIGGPRGYTIPVASLGKGVACNPACFITQLLPVKRKLGFYEATSRLRSHINPTGTVLLQLENTMQTSLKDLL

SEQ ID NO: 925 - DNA, 1194 bp, Artificial Sequence
  variant of human alpha-galactosidase A
ctggataatggattggctagaacacctcctatggggtggcttcactgggagaggttcatgtgcaacctggactgtcaggaagaaccagacagctgcatctccgagaagctctttgaggaaatggccgaacgaatggtgactgacggctggaaagatgcaggttacgagtatctgtgtattgacgattgctggatggccccacaacgggattctgagggaagacttcaggctgatccgcagcgcttccctcatggcataaggcagctggcaaaccacgtccacagtaaggggctcaaattgggaatctacgcggacgtgggcaataagacctgtgccggttttccgggatcattcgggtattatgacattgacgcccaaacgtttgctgattggggcgttgacctgctgaaattcgatggttgctactgtgacagcctcgaaaacctggcagacggctacaagcatatgtctctcgccctgaataaaaccggtcggccaatcgtatattcctgcgagtggcctctttacatgtggccatttcagaaaccgaactacacagaaattcgccagtattgcaatcattggaggaacttcgctgatatcgatgactcatgggcctccataaagagcatcttggactggaccagtcggaatcaggagcgaattgtggatgtcgcaggccctggaggatggaacgatccagacatgctggtgatcggcaattttggcctctcttgggaccagcaggttacccaaatggctctgtgggcaattatggccggtcctcttttcatgagcaacgatctgcgcgcgatctcaccacaggcaaaggccctgctccaagacaaagatgtgatagccatcaatcaggacccgttgggaaagcagggctaccagtttagaaaaggcgacaactttgaggtctgggaaaggcctttgagtggagatgcgtgggctgtggccattattaatcggcaagagatcggaggtccacgcggttatacaattcctgtagcatctcttggcaagggcgttgcctgtaacccagcttgcttcatcactcagcttctgccggtgaagagaaaactgggtttctacgaagctaccagcaggctccgatcccacatcaaccctacaggaaccgttctcttgcagctggagaatacgatgcagacttcactgaaggacctcctg

SEQ ID NO: 926 - protein, 398 aa, Artificial Sequence
  variant of human alpha-galactosidase A
LDNGLARTPPMGWLHWERFMCNLDCQEEPDSCISEKLFEEMAERMVTDGWKDAGYEYLCIDDCWMAPQRDSEGRLQADPQRFPHGIRQLANHVHSKGLKLGIYADVGNKTCAGFPGSFGYYDIDAQTFADWGVDLLKFDGCYCDSLENLADGYKHMSLALNKTGRPIVYSCEWPLYMWPFQKPNYTEIRQYCNHWRNFADIDDSWASIKSILDWTSRNQERIVDVAGPGGWNDPDMLVIGNFGLSWDQQVTQMALWAIMAGPLFMSNDLRAISPQAKALLQDKDVIAINQDPLGKQGYQFRKGDNFEVWERPLSGDAWAVAIINRQEIGGPRGYTIPVASLGKGVACNPACFITQLLPVKRKLGFYEATSRLRSHINPTGTVLLQLENTMQTSLKDLL

SEQ ID NO: 927 - DNA, 1194 bp, Artificial Sequence
  variant of human alpha-galactosidase A
ctggataatggattggctagaacacctcctatggggtggcttcactgggagaggttcatgtgcaacctggactgtcaggaagaaccagacagctgcatctccgagaagctctttgaggaaatggccgaacgaatggtgactgacggctggaaagatgcaggttacgagtatctgtgtattgacgattgctggatggccccacaacgggattctgagggaagacttcaggctgatccgcagcgcttccctcatggcataaggcagctggcaaaccacgtccacagtaaggggctcaaattgggaatctacgcggacgtgggcaataagacctgtgccggttttccgggatcattcgggtattatgacattgacgcccaaacgtttgctgattggggcgttgacctgctgaaattcgatggttgctactgtgacagcctcgaaaacctggcagacggctacaagcatatgtctctcgccctgaataaaaccggtcggccaatcgtatattcctgcgagtggcctctttacatgtggccatttcagaaaccgaactacacagaaattcgccagtattgcaatcattggaggaacttcgctgatatcgatgactcatgggcctccataaagagcatcttggactggaccagtcggaatcaggagcgaattgtggatgtcgcaggccctggaggatggaacgatccagacatgctggtgatcggcaattttggcctctcttgggaccagcaggttacccaaatggctctgtgggcaattatggccggtcctcttttcatgagcaacgatctgcgcgcgatctcaccacaggcaaaggccctgctccaagacaaagatgtgatagccatcaatcaggacccgttgggaaagcagggctaccagctgagaaaaggcgacaactttgaggtctgggaaaggcctttgagtggagatgcgtgggctgtggccattattaatcggcaagagatcggaggtccacgcggttatacaattcctgtagcatcttttggcaagggcgttgcctgtaacccagcttgcttcatcactcagcttctgccggtgaagagaaaactgggtttctacgaagctaccagcaggctccgatcccacatcaaccctacaggaaccgtcctcttgcagctggagaatacgatgcagacttcactgaaggacctcctg

SEQ ID NO: 928 - protein, 398 aa, Artificial Sequence
  variant of human alpha-galactosidase A
LDNGLARTPPMGWLHWERFMCNLDCQEEPDSCISEKLFEEMAERMVTDGWKDAGYEYLCIDDCWMAPQRDSEGRLQADPQRFPHGIRQLANHVHSKGLKLGIYADVGNKTCAGFPGSFGYYDIDAQTFADWGVDLLKFDGCYCDSLENLADGYKHMSLALNKTGRPIVYSCEWPLYMWPFQKPNYTEIRQYCNHWRNFADIDDSWASIKSILDWTSRNQERIVDVAGPGGWNDPDMLVIGNFGLSWDQQVTQMALWAIMAGPLFMSNDLRAISPQAKALLQDKDVIAINQDPLGKQGYQLRKGDNFEVWERPLSGDAWAVAIINRQEIGGPRGYTIPVASFGKGVACNPACFITQLLPVKRKLGFYEATSRLRSHINPTGTVLLQLENTMQTSLKDLL

SEQ ID NO: 929 - DNA, 1194 bp, Artificial Sequence
  variant of human alpha-galactosidase A
ctggataatggattggctagaacacctcctatggggtggcttcactgggagaggttcatgtgcaacctggactgtcaggaagaaccagacagctgcatctccgagaagctctttgaggaaatggccgaacgaatggtgactgacggctggaaagatgcaggttacgagtatctgtgtattgacgattgctggatggccccacaacgggattctgagggaagacttcaggctgatccgcagcgcttccctcatggcataaggcagctggcaaaccacgtccacagtaaggggctcaaattgggaatctacgcggacgtgggcaataagacctgtgccggttttccgggatcattcgggtattatgacattgacgcccaaacgtttgctgattggggcgttgacctgctgaaattcgatggttgctactgtgacagcctcgaaaacctggcagacggctacaagcatatgtctctcgccctgaataaaaccggtcggccaatcgtatattcctgcgagtggcctctttacatgtggccatttcagaaaccgaactacacagaaattcgccagtattgcaatcattggaggaacttcgctgatatcgatgactcatgggcctccataaagagcatcttggactggaccagtcggaatcaggagcgaattgtggatgtcgcaggccctggaggatggaacgatccagacatgctggtgatcggcaattttggcctctcttgggaccagcaggttacccaaatggctctgtgggcaattatggccggtcctcttttcatgagcaacgatctgcgcgcgatctcaccacaggcaaaggccctgctccaagacaaagatgtgatagccatcaatcaggacccgttgggaaagcagggctaccagctgagaaaaggcgacaactttgaggtctgggaaaggcctttgagtggagatgcgtgggctgtggccattattaatcggcaagagatcggaggtccacgcggttatacaattcctgtagcatctatgggcaagggcgttgcctgtaacccagcttgcttcatcactcagcttctgccggtgaagagaaaactgggtttctacgaagctaccagcaggctccgatcccacatcaaccctacaggaaccgtcctcttgcagctggagaatacgatgcagacttcactgaaggacctcctg

SEQ ID NO: 930 - protein, 398 aa, Artificial Sequence
  variant of human alpha-galactosidase A
LDNGLARTPPMGWLHWERFMCNLDCQEEPDSCISEKLFEEMAERMVTDGWKDAGYEYLCIDDCWMAPQRDSEGRLQADPQRFPHGIRQLANHVHSKGLKLGIYADVGNKTCAGFPGSFGYYDIDAQTFADWGVDLLKFDGCYCDSLENLADGYKHMSLALNKTGRPIVYSCEWPLYMWPFQKPNYTEIRQYCNHWRNFADIDDSWASIKSILDWTSRNQERIVDVAGPGGWNDPDMLVIGNFGLSWDQQVTQMALWAIMAGPLFMSNDLRAISPQAKALLQDKDVIAINQDPLGKQGYQLRKGDNFEVWERPLSGDAWAVAIINRQEIGGPRGYTIPVASMGKGVACNPACFITQLLPVKRKLGFYEATSRLRSHINPTGTVLLQLENTMQTSLKDLL

SEQ ID NO: 931 - DNA, 1194 bp, Artificial Sequence
  variant of human alpha-galactosidase A
ctggataatggattggctagaacacctcctatggggtggcttcactgggagaggttcatgtgcaacctggactgtcaggaagaaccagacagctgcatctccgagaagctctttgaggaaatggccgaacgaatggtgactgacggctggaaagatgcaggttacgagtatctgtgtattgacgattgctggatggccccacaacgggattctgagggaagacttcaggctgatccgcagcgcttccctcatggcataaggcagctggcaaaccacgtccacagtaaggggctcaaattgggaatctacgcggacgtgggcaataagacctgtgccggttttccgggatcattcgggtattatgacattgacgcccaaacgtttgctgattggggcgttgacctgctgaaattcgatggttgctactgtgacagcctcgaaaacctggcagacggctacaagcatatgtctctcgccctgaataaaaccggtcggccaatcgtatattcctgcgagtggcctctttacatgtggccatttcagaaaccgaactacacagaaattcgccagtattgcaatcattggaggaacttcgctgatatcgatgactcatgggcctccataaagagcatcttggactggaccagtcggaatcaggagcgaattgtggatgtcgcaggccctggaggatggaacgatccagacatgctggtgatcggcaattttggcctctcttgggaccagcaggttacccaaatggctctgtgggcaattatggccggtcctcttttcatgagcaacgatctgcgcgcgatctcaccacaggcaaaggccctgctccaagacaaagatgtgatagccatcaatcaggacccgttgggaaagcagggctaccagctgagaaaaggcgacaactttgaggtctgggaaaggcctttgagtggagatgcgtgggctgtggccattattaatcggcaagagatcggaggtccacgcggttatacaattcctgtagcatctcttggcaagggcgttgcctgtaacccagcttgcttcatcactcagcttctgccggtgaagagaaaactgggtttctacgaagctaccagcaggctccgatcccacatcaaccctacaggaaccgtcctcttgcagctggagaatacgatgcagacttcactgaaggacctcttt

SEQ ID NO: 932 - protein, 398 aa, Artificial Sequence
  variant of human alpha-galactosidase A
LDNGLARTPPMGWLHWERFMCNLDCQEEPDSCISEKLFEEMAERMVTDGWKDAGYEYLCIDDCWMAPQRDSEGRLQADPQRFPHGIRQLANHVHSKGLKLGIYADVGNKTCAGFPGSFGYYDIDAQTFADWGVDLLKFDGCYCDSLENLADGYKHMSLALNKTGRPIVYSCEWPLYMWPFQKPNYTEIRQYCNHWRNFADIDDSWASIKSILDWTSRNQERIVDVAGPGGWNDPDMLVIGNFGLSWDQQVTQMALWAIMAGPLFMSNDLRAISPQAKALLQDKDVIAINQDPLGKQGYQLRKGDNFEVWERPLSGDAWAVAIINRQEIGGPRGYTIPVASLGKGVACNPACFITQLLPVKRKLGFYEATSRLRSHINPTGTVLLQLENTMQTSLKDLF

SEQ ID NO: 933 - DNA, 1194 bp, Artificial Sequence
  variant of human alpha-galactosidase A
ctggataatggaatggctagaacacctcctatggggtggcttcactgggagaggttcatgtgcaacctggactgtcaggaagaaccagacagctgcatctccgagaagctctttgaggaaatggccgaacgaatggtgactgacggctggaaagatgcaggttacgagtatctgtgtattgacgattgctggatggccccacaacgggattctgagggaagacttcaggctgatccgcagcgcttccctcatggcataaggcagctggcaaaccacgtccacagtaaggggctcaaattgggaatctacgcggacgtgggcaataagacctgtgccggttttccgggatcattcgggtattatgacattgacgcccaaacgtttgctgattggggcgttgacctgctgaaattcgatggttgctactgtgacagcctcgaaaacctggcagacggctacaagcatatgtctctcgccctgaataaaaccggtcggccaatcgtatattcctgcgagtggcctctttacatgtggccatttcagaaaccgaactacacagaaattcgccagtattgcaatcattggaggaacttcgctgatatcgatgactcatgggcctccataaagagcatcttggactggaccagtcggaatcaggagcgaattgtggatgtcgcaggccctggaggatggaacgatccagacatgctggtgatcggcaattttggcctctcttgggaccagcaggttacccaaatggctctgtgggcaattatggccggtcctcttttcatgagcaacgatctgcgcgcgatctcaccacaggcaaaggccctgctccaagacaaagatgtgatagccatcaatcaggacccgttgggaaagcagggctaccagctgagaaaaggcgacaactttgaggtctgggaaaggcctttgagtggagatgcgtgggctgtggccattattaatcggcaagagatcggaggtccacgcggttatacaattcctgtagcatctcttggcaagggcgttgcctgtaacccagcttgcttcatcactcagcttctgccggtgaagagaaaactgggtttctacgaagctaccagcaggctccgatcccacatcaaccctacaggaaccgtcctcttgcagctggagaatacgatgcagacttcactgaaggacctcctg

SEQ ID NO: 934 - protein, 398 aa, Artificial Sequence
  variant of human alpha-galactosidase A
LDNGMARTPPMGWLHWERFMCNLDCQEEPDSCISEKLFEEMAERMVTDGWKDAGYEYLCIDDCWMAPQRDSEGRLQADPQRFPHGIRQLANHVHSKGLKLGIYADVGNKTCAGFPGSFGYYDIDAQTFADWGVDLLKFDGCYCDSLENLADGYKHMSLALNKTGRPIVYSCEWPLYMWPFQKPNYTEIRQYCNHWRNFADIDDSWASIKSILDWTSRNQERIVDVAGPGGWNDPDMLVIGNFGLSWDQQVTQMALWAIMAGPLFMSNDLRAISPQAKALLQDKDVIAINQDPLGKQGYQLRKGDNFEVWERPLSGDAWAVAIINRQEIGGPRGYTIPVASLGKGVACNPACFITQLLPVKRKLGFYEATSRLRSHINPTGTVLLQLENTMQTSLKDLL

SEQ ID NO: 935 - DNA, 1194 bp, Artificial Sequence
  variant of human alpha-galactosidase A
ctggataatggagtggctagaacacctcctatggggtggcttcactgggagaggttcatgtgcaacctggactgtcaggaagaaccagacagctgcatctccgagaagctctttgaggaaatggccgaacgaatggtgactgacggctggaaagatgcaggttacgagtatctgtgtattgacgattgctggatggccccacaacgggattctgagggaagacttcaggctgatccgcagcgcttccctcatggcataaggcagctggcaaaccacgtccacagtaaggggctcaaattgggaatctacgcggacgtgggcaataagacctgtgccggttttccgggatcattcgggtattatgacattgacgcccaaacgtttgctgattggggcgttgacctgctgaaattcgatggttgctactgtgacagcctcgaaaacctggcagacggctacaagcatatgtctctcgccctgaataaaaccggtcggccaatcgtatattcctgcgagtggcctctttacatgtggccatttcagaaaccgaactacacagaaattcgccagtattgcaatcattggaggaacttcgctgatatcgatgactcatgggcctccataaagagcatcttggactggaccagtcggaatcaggagcgaattgtggatgtcgcaggccctggaggatggaacgatccagacatgctggtgatcggcaattttggcctctcttgggaccagcaggttacccaaatggctctgtgggcaattatggccggtcctcttttcatgagcaacgatctgcgcgcgatctcaccacaggcaaaggccctgctccaagacaaagatgtgatagccatcaatcaggacccgttgggaaagcagggctaccagctgagaaaaggcgacaactttgaggtctgggaaaggcctttgagtggagatgcgtgggctgtggccattattaatcggcaagagatcggaggtccacgcggttatacaattcctgtagcatctcttggcaagggcgttgcctgtaacccagcttgcttcatcactcagcttctgccggtgaagagaaaactgggtttctacgaagctaccagcaggctccgatcccacatcaaccctacaggaaccgtcctcttgcagctggagaatacgatgcagacttcactgaaggacctcctg

SEQ ID NO: 936 - protein, 398 aa, Artificial Sequence
  variant of human alpha-galactosidase A
LDNGVARTPPMGWLHWERFMCNLDCQEEPDSCISEKLFEEMAERMVTDGWKDAGYEYLCIDDCWMAPQRDSEGRLQADPQRFPHGIRQLANHVHSKGLKLGIYADVGNKTCAGFPGSFGYYDIDAQTFADWGVDLLKFDGCYCDSLENLADGYKHMSLALNKTGRPIVYSCEWPLYMWPFQKPNYTEIRQYCNHWRNFADIDDSWASIKSILDWTSRNQERIVDVAGPGGWNDPDMLVIGNFGLSWDQQVTQMALWAIMAGPLFMSNDLRAISPQAKALLQDKDVIAINQDPLGKQGYQLRKGDNFEVWERPLSGDAWAVAIINRQEIGGPRGYTIPVASLGKGVACNPACFITQLLPVKRKLGFYEATSRLRSHINPTGTVLLQLENTMQTSLKDLL

SEQ ID NO: 937 - DNA, 1194 bp, Artificial Sequence
  variant of human alpha-galactosidase A
ctggataatggattggctagaacacctcctatggggtggcttcactgggagaggttcatgtgcaacctggattgtcaggaagaaccagacagctgcatctccgagaagctctttgaggaaatggccgaacgaatggtgactgacggctggaaagatgcaggttacgagtatctgtgcattgacgattgctggatggccccacaacgggattctgagggaagacttcaggctgatccgcagcgcttccctcatggcataaggcagctggcaaaccacgtccacagtaaggggctcaaattgggaatctacgcggacgtgggcaataagacctgtgccggttttccgggatcattcgggtattatgacattgacgcccaaacgtttgctgattggggcgttgacctgctgaaattcgatggttgctactgtgacagcctcgaaaacctggcagacggctacaagcatatgtctctcgccctgaataaaaccggtcggccaatcgtatattcctgcgagtggcctctttacatgtggccatttcagaaaccgaactacacagaaattcgccagtattgcaatcattggaggaacttcgctgatatcgatgactcatgggcctccataaagagcatcttggactggaccagtcggaatcaggagcgaattgtggatgtcgcaggccctggaggatggaacgatccagacatgctggtgatcggcaattttggcctctcttgggaccagcaggttacccaaatggctctgtgggcaattatggccggtcctcttttcatgagcaacgatctgcgcgcaatctcaccacaggcaaaggccctgctccaagacaaagatgtgatagccatcaatcaggacccgttgggaaagcagggctaccagctgagaaaaggcgacaactttgaggtctgggaaaggcctttgagtggagatgcgtgggctgtggccattattaatcggcaagagatcggaggtccacgcggttatacaattcctgtagcatctcttggcaagggcgttgcctgtaacccagcttgcttcatcactcagcttctgccggtgaagagaaaactgggtttctacgaagctaccagcaggctccgatcccacatcaaccctacaggaaccgtcctcttgcagctggaaaatacgagtcaaacttcactgaaggacctcctg

SEQ ID NO: 938 - protein, 398 aa, Artificial Sequence
  variant of human alpha-galactosidase A
LDNGLARTPPMGWLHWERFMCNLDCQEEPDSCISEKLFEEMAERMVTDGWKDAGYEYLCIDDCWMAPQRDSEGRLQADPQRFPHGIRQLANHVHSKGLKLGIYADVGNKTCAGFPGSFGYYDIDAQTFADWGVDLLKFDGCYCDSLENLADGYKHMSLALNKTGRPIVYSCEWPLYMWPFQKPNYTEIRQYCNHWRNFADIDDSWASIKSILDWTSRNQERIVDVAGPGGWNDPDMLVIGNFGLSWDQQVTQMALWAIMAGPLFMSNDLRAISPQAKALLQDKDVIAINQDPLGKQGYQLRKGDNFEVWERPLSGDAWAVAIINRQEIGGPRGYTIPVASLGKGVACNPACFITQLLPVKRKLGFYEATSRLRSHINPTGTVLLQLENTSQTSLKDLL

SEQ ID NO: 939 - DNA, 1194 bp, Artificial Sequence
  variant of human alpha-galactosidase A
ctggataatggattggctagaacacctcctatggggtggcttcactgggagaggttcatgtgcaacctggactgtcaggaagaaccagacagctgcatctccgagaagctctttgaggaaatggccgaacgaatggtgactgacggctggaaagatgcaggttacgagtatctgtgtattgacgattgctggatggccccacaacgggattctgagggaagacttcaggctgatccgcagcgcttccctcatggcatacgccagctggcaaaccacgtccacagtaaggggctcaaattgggaatctacgcggacgtgggcaataagacctgtgccggttttccgggatcattcgggtattatgacattgacgcccaaacgtttgctgattggggcgttgacctgctgaaattcgatggttgctactgtgacagcctcgaaaacctggcagacggctacaagcatatgtctctcgccctgaataaaaccggtcggccaatcgtatattcctgcgagtggcctctttacatgtggccatttcagaaaccgaactacacagaaattcgccagtattgcaatcattggaggaacttcgctgatatcgatgactcatgggcctccataaagagcatcttggactggactagtcggtaccaggagcgaattgtggatgtcgcaggccctggaggatggaacgatccagacatgctggtgatcggcaattttggcctctcttgggaccagcaggttacccaaatggctctgtgggcaattatggccggtcctcttttcatgagcaacgatctgcgcgcgatctcaccacaggcaaaggccctgctccaagacaaagatgtgatagccatcaatcaggacccgttgggaaagcagggctaccagctgagaaaaggcgacaactttgaggtctgggaaaggcctttgagtggagatgcgtgggctgtggccattattaatcggcaagagatcggaggtccacgcggttatacaattcctgtagcatctcttggcaagggcgttgcctgtaacccagcttgcttcatcactcagcttctgccggtgaagcgtaaactgggtttctacgaagctaccagcaggctccgatcccacatcaaccctacaggaaccgtcctcttgcagctggagaatacgatgcagacttcactgaaggacctcctg

SEQ ID NO: 940 - protein, 398 aa, Artificial Sequence
  variant of human alpha-galactosidase A
LDNGLARTPPMGWLHWERFMCNLDCQEEPDSCISEKLFEEMAERMVTDGWKDAGYEYLCIDDCWMAPQRDSEGRLQADPQRFPHGIRQLANHVHSKGLKLGIYADVGNKTCAGFPGSFGYYDIDAQTFADWGVDLLKFDGCYCDSLENLADGYKHMSLALNKTGRPIVYSCEWPLYMWPFQKPNYTEIRQYCNHWRNFADIDDSWASIKSILDWTSRYQERIVDVAGPGGWNDPDMLVIGNFGLSWDQQVTQMALWAIMAGPLFMSNDLRAISPQAKALLQDKDVIAINQDPLGKQGYQLRKGDNFEVWERPLSGDAWAVAIINRQEIGGPRGYTIPVASLGKGVACNPACFITQLLPVKRKLGFYEATSRLRSHINPTGTVLLQLENTMQTSLKDLL

SEQ ID NO: 941 - DNA, 1194 bp, Artificial Sequence
  variant of human alpha-galactosidase A
ctggataatggattggctagaacacctcctatggggtggcttcactgggagaggttcatgtgcaacctggactgtcaggaagaaccagacagctgcatctccgagaagctctttgaggaaatggccgaacgaatggtgactgacggctggaaagatgcaggttacgagtatctgtgtattgacgattgctggatggccccacaacgggattctgagggacgtcttcaggctgatccgcagcgcttccctcatggcatacgccagctggcaaaccacgtccacagtaaggggctcaaattgggaatctacgcggacgtgggcaataagacctgtgccggttttccgggatcattcgggtattatgacattgacgcccaaacgtttgctgattggggcgttgacctgctgaaattcgatggttgctactgtgacagcctcgaaaacctggcagacggctacaagcatatgtctctcgccctgaataaaaccggtcggccaatcgtatattcctgcgagtggcctctttacatgtggccatttcagaaaccgaactacacagaaattcgccagtattgcaatcattggaggaacttcgctgatatcgatgactcatgggcctccataaagagcatcttggactggactagtcggtaccaggagcgaattgtggatgtcgcaggccctggaggatggaacgatccagacatgctggtgatcggcaattttggcctctcttgggaccagcaggttacccaaatggctctgtgggcaattatggccggtcctcttttcatgagcaacgatctgcgcgcgatctcaccacaggcaaaggccctgctccaagacaaagatgtgatagccatcaatcaggacccgttgggaaagcagggctaccagctgagaaaaggcgacaactttgaggtctgggaaaggcctttgagtggagatgcgtgggctgtggccattattaatcggcaagagatcggaggtccacgcggttatacaattcctgtagcatctcttggcaagggcgttgcctgtaacccagcttgcttcatcactcagcttctgccggtgaagagaaaactgggtttctacgaagctaccagcaggctccgatcccacatcaaccctacaggaaccgttctcttgcagctggagaatacgatgcagacttcactgaaggacctcttt

SEQ ID NO: 942 - protein, 398 aa, Artificial Sequence
  variant of human alpha-galactosidase A
LDNGLARTPPMGWLHWERFMCNLDCQEEPDSCISEKLFEEMAERMVTDGWKDAGYEYLCIDDCWMAPQRDSEGRLQADPQRFPHGIRQLANHVHSKGLKLGIYADVGNKTCAGFPGSFGYYDIDAQTFADWGVDLLKFDGCYCDSLENLADGYKHMSLALNKTGRPIVYSCEWPLYMWPFQKPNYTEIRQYCNHWRNFADIDDSWASIKSILDWTSRYQERIVDVAGPGGWNDPDMLVIGNFGLSWDQQVTQMALWAIMAGPLFMSNDLRAISPQAKALLQDKDVIAINQDPLGKQGYQLRKGDNFEVWERPLSGDAWAVAIINRQEIGGPRGYTIPVASLGKGVACNPACFITQLLPVKRKLGFYEATSRLRSHINPTGTVLLQLENTMQTSLKDLF

SEQ ID NO: 943 - DNA, 1194 bp, Artificial Sequence
  variant of human alpha-galactosidase A
ctggataatggattggctagaacacctcctatggggtggcttcactgggagaggttcatgtgcaacctggactgtcaggaagaaccagacagctgcatctccgagaagctctttgaggaaatggccgaacgaatggtgactgacggctggaaagatgcaggttacgagtatctgtgtattgacgattgctggatggccccacaacgggattctgagggacgtcttcaggctgatccgcagcgcttccctcatggcataaggcagctggcaaaccacgtccacagtaaggggctcaaattgggaatctacgcggacgtgggcaataagacctgtgccggttttccgggatcattcgggtattatgacattgacgcccaaacgtttgctgattggggcgttgacctgctgaaattcgatggttgctactgtgacagcctcgaaaacctggcagacggctacaagcatatgtctctcgccctgaataaaaccggtcggccaatcgtatattcctgcgagtggcctctttacatgtggccatttcagaaaccgaactacacagaaattcgccagtattgcaatcattggaggaacttcgctgatatcgatgactcatgggcctccataaagagcatcttggactggactagtcggtaccaggagcgaattgtggatgtcgcaggccctggaggatggaacgatccagacatgctggtgatcggcaattttggcctctcttgggaccagcaggttacccaaatggctctgtgggcaattatggccggtcctcttttcatgagcaacgatctgcgcgcgatctcaccacaggcaaaggccctgctccaagacaaagatgtgatagccatcaatcaggacccgttgggaaagcagggctaccagctgagaaaaggcgacaactttgaggtctgggaaaggcctttgagtggagatgcgtgggctgtggccattattaatcggcaagagatcggaggtccacgcggttatacaattcctgtagcatctcttggcaagggcgttgcctgtaacccagcttgcttcatcactcagcttctgccggtgaagaccaaactgggtttctacgaagctaccagcaggctccgatcccacatcaaccctacaggaaccgtcctcttgcagctggagaatacgatgcagacttcactgaaggacctcctg

SEQ ID NO: 944 - protein, 398 aa, Artificial Sequence
  variant of human alpha-galactosidase A
LDNGLARTPPMGWLHWERFMCNLDCQEEPDSCISEKLFEEMAERMVTDGWKDAGYEYLCIDDCWMAPQRDSEGRLQADPQRFPHGIRQLANHVHSKGLKLGIYADVGNKTCAGFPGSFGYYDIDAQTFADWGVDLLKFDGCYCDSLENLADGYKHMSLALNKTGRPIVYSCEWPLYMWPFQKPNYTEIRQYCNHWRNFADIDDSWASIKSILDWTSRYQERIVDVAGPGGWNDPDMLVIGNFGLSWDQQVTQMALWAIMAGPLFMSNDLRAISPQAKALLQDKDVIAINQDPLGKQGYQLRKGDNFEVWERPLSGDAWAVAIINRQEIGGPRGYTIPVASLGKGVACNPACFITQLLPVKTKLGFYEATSRLRSHINPTGTVLLQLENTMQTSLKDLL

SEQ ID NO: 945 - DNA, 1194 bp, Artificial Sequence
  variant of human alpha-galactosidase A
ctggataatggattggctagaacacctcctatggggtggcttcactgggagaggttcatgtgcaacctggactgtcaggaagaaccagacagctgcatctccgagaagctctttgaggaaatggccgaacgaatggtgactgacggctggaaagatgcaggttacgagtatctgtgtattgacgattgctggatggccccacaacgggattctgagggacgtcttcaggctgatccgcagcgcttccctcatggcataaggcagctggcaaaccacgtccacagtaaggggctcaaattgggaatctacgcggacgtgggcaataagacctgtgccggttttccgggatcattcgggtattatgacattgacgcccaaacgtttgctgattggggcgttgacctgctgaaattcgatggttgctactgtgacagcctcgaaaacctggcagacggctacaagcatatgtctctcgccctgaataaaaccggtcggccaatcgtatattcctgcgagtggcctctttacatgtggccatttcagaaaccgaactacacagaaattcgccagtattgcaatcattggaggaacttcgctgatatcgatgactcatgggcctccataaagagcatcttggactggactagtcggtaccaggagcgaattgtggatgtcgcaggccctggaggatggaacgatccagacatgctggtgatcggcaattttggcctctcttgggaccagcaggttacccaaatggctctgtgggcaattatggccggtcctcttttcatgagcaacgatctgcgcgcgatctcaccacaggcaaaggccctgctccaagacaaagatgtgatagccatcaatcaggacccgttgggaaagcagggctaccagctgagaaaaggcgacaactttgaggtctgggaaaggcctttgagtggagatgcgtgggctgtggccattattaatcggcaagagatcggaggtccacgcggttatacaattcctgtagcatctcttggcaagggcgttgcctgtaacccagcttgcttcatcactcagcttctgccggtgaagaccaaactgggtttctacgaagctaccagcaggctccgatcccacatcaaccctacaggaaccgtcctcttgcagctggagaatacgatgcagacttcactgaaggacctcttt

SEQ ID NO: 946 - protein, 398 aa, Artificial Sequence
  variant of human alpha-galactosidase A
LDNGLARTPPMGWLHWERFMCNLDCQEEPDSCISEKLFEEMAERMVTDGWKDAGYEYLCIDDCWMAPQRDSEGRLQADPQRFPHGIRQLANHVHSKGLKLGIYADVGNKTCAGFPGSFGYYDIDAQTFADWGVDLLKFDGCYCDSLENLADGYKHMSLALNKTGRPIVYSCEWPLYMWPFQKPNYTEIRQYCNHWRNFADIDDSWASIKSILDWTSRYQERIVDVAGPGGWNDPDMLVIGNFGLSWDQQVTQMALWAIMAGPLFMSNDLRAISPQAKALLQDKDVIAINQDPLGKQGYQLRKGDNFEVWERPLSGDAWAVAIINRQEIGGPRGYTIPVASLGKGVACNPACFITQLLPVKTKLGFYEATSRLRSHINPTGTVLLQLENTMQTSLKDLF

SEQ ID NO: 947 - DNA, 1194 bp, Artificial Sequence
  variant of human alpha-galactosidase A
ctggataatggattggctagaacacctcctatggggtggcttcactgggagaggttcatgtgcaacctggactgtcaggaagaaccagacagctgcatctccgagaagctctttgaggaaatggccgaacgaatggtgactgacggctggaaagatgcaggttacgagtatctgtgtattgacgattgctggatggccccacaacgggattctgagggaagacttcaggctgatccgcagcgcttccctcatggcataaggcagctggcaaaccacgtccacagtaaggggctcaaattgggaatctacgcggacgtgggcaataagacctgtgccggttttccgggatcattcgggtattatgacattgacgcccaaacgtttgctgattggggcgttgacctgctgaaattcgatggttgctactgtgacagcctcgaaaacctggcagacggctacaagcatatgtctctcgccctgaataaaaccggtcggccaatcgtatattcctgcgagtggcctctttacatgtggccatttcagaaaccgaactacacagaaattcgccagtattgcaatcattggaggaacttcgctgatatcgatgactcatgggcctccataaagagcatcttggactggaccagtcggaatcaggagcgaattgtggatgtcgcaggccctggaggatggaacgatccagacatgctggtgatcggcaattttggcctctcttgggaccagcaggttacccaaatggctctgtgggcaattatggccggtcctcttttcatgagcaacgatctgcgcgcgatctcaccacaggcaaaggccctgctccaagacaaagatgtgatagccatcaatcaggacccgttgggaaagcagggctaccagctgagaaaaggcgacaactttgaggtctgggaaaggcctttgagtggagatgcgtgggctgtggccattattaatcggcaagagatcggaggtccacgcggttatacaattcctgtagcatctcttggcaagggcgttgcctgtaacccagcttgcttcatcactcagcttctgccggtgaagagaaaactgggtttctacgaagctaccagcaggctccgatcccacatccagcctacaggaaccgtcctcttgcagctggagaatacgatgcagacttcactgaaggacctcctg

SEQ ID NO: 948 - protein, 398 aa, Artificial Sequence
  variant of human alpha-galactosidase A
LDNGLARTPPMGWLHWERFMCNLDCQEEPDSCISEKLFEEMAERMVTDGWKDAGYEYLCIDDCWMAPQRDSEGRLQADPQRFPHGIRQLANHVHSKGLKLGIYADVGNKTCAGFPGSFGYYDIDAQTFADWGVDLLKFDGCYCDSLENLADGYKHMSLALNKTGRPIVYSCEWPLYMWPFQKPNYTEIRQYCNHWRNFADIDDSWASIKSILDWTSRNQERIVDVAGPGGWNDPDMLVIGNFGLSWDQQVTQMALWAIMAGPLFMSNDLRAISPQAKALLQDKDVIAINQDPLGKQGYQLRKGDNFEVWERPLSGDAWAVAIINRQEIGGPRGYTIPVASLGKGVACNPACFITQLLPVKRKLGFYEATSRLRSHIQPTGTVLLQLENTMQTSLKDLL

SEQ ID NO: 949 - DNA, 1194 bp, Artificial Sequence
  variant of human alpha-galactosidase A
ctggataatggattggctagaacacctcctatggggtggcttcactgggagaggttcatgtgcaacctggactgtcaggaagaaccagacagctgcatctccgagaagctctttgaggaaatggccgaacgaatggtgactgacggctggaaagatgcaggttacgagtatctgtgtattgacgattgctggatggccccacaacgggattctgagggaagacttcaggctgatccgcagcgcttccctcatggcatacgccagctggcaagccacgtccacagtaaggggctcaaattgggaatctacgcggacgtgggcaataagacctgtgccggttttccgggatcattcgggtattatgacattgacgcccaaacgtttgctgattggggcgttgacctgctgaaattcgatggttgctactgtgacagcctcgaaaacctggcagacggctacaagcatatgtctctcgccctgaataaaaccggtcggccaatcgtatattcctgcgagtggcctctttacatgtggccatttcagaaaccgaactacacagaaattcgccagtattgcaatcattggaggaacttcgctgatatcgatgactcatgggcctccataaagagcatcttggactggagtagtcggaaccaggagcgaattgtggatgtcgcaggccctggaggatggaacgatccagacatgctggtgatcggcaattttggcctctcttgggaccagcaggttacccaaatggctctgtgggcaattatggccggtcctcttttcatgagcaacgatctgcgcgcgatctcaccacaggcaaaggccctgctccaagacaaagatgtgatagccatcaatcaggacccgttgggaaagcagggctaccagctgagaaaaggcgacaactttgaggtctgggaaaggcctttgagtggagatgcgtgggctgtggccattattaatcggcaagagatcggaggtccacgcggttatacaattcctgtagcatctcttggcaagggcgttgcctgtaacccagcttgcttcatcactcagcttctgccggtgaagaccaaactgggtttctacgaagctaccagcaggctccgatcccacatcaaccctacaggaaccgttctcttgcagctggagaatacgatgcagacttcactgaaggacctcctg

SEQ ID NO: 950 - protein, 398 aa, Artificial Sequence
  variant of human alpha-galactosidase A
LDNGLARTPPMGWLHWERFMCNLDCQEEPDSCISEKLFEEMAERMVTDGWKDAGYEYLCIDDCWMAPQRDSEGRLQADPQRFPHGIRQLASHVHSKGLKLGIYADVGNKTCAGFPGSFGYYDIDAQTFADWGVDLLKFDGCYCDSLENLADGYKHMSLALNKTGRPIVYSCEWPLYMWPFQKPNYTEIRQYCNHWRNFADIDDSWASIKSILDWSSRNQERIVDVAGPGGWNDPDMLVIGNFGLSWDQQVTQMALWAIMAGPLFMSNDLRAISPQAKALLQDKDVIAINQDPLGKQGYQLRKGDNFEVWERPLSGDAWAVAIINRQEIGGPRGYTIPVASLGKGVACNPACFITQLLPVKTKLGFYEATSRLRSHINPTGTVLLQLENTMQTSLKDLL

SEQ ID NO: 951 - DNA, 1194 bp, Artificial Sequence
  variant of human alpha-galactosidase A
ctggataatggattggctagaacacctcctatggggtggcttcactgggagaggttcatgtgcaacctggactgtcaggaagaaccagacagctgcatctccgagaagctctttgaggaaatggccgaacgaatggtgactgacggctggaaagatgcaggttacgagtatctgtgtattgacgattgctggatggccccacaacgggattctgagggaagacttcaggctgatccgcagcgcttccctcatggcataaggcagctggcaaaccacgtccacagtaaggggctcaaattgggaatctacgcggacgtgggcaataagacctgtgccggttttccgggatcattcgggtattatgacattgacgcccaaacgtttgctgattggggcgttgacctgctgaaattcgatggttgctactgtgacagcctcgaaaacctggcagacggctacaagcatatgtctctcgccctgaataaaaccggtcggccaatcgtatattcctgcgagtggcctctttacatgtggcattttcagaaaccgaactacacagaaattcgccagtattgcaatcattggaggaacttcgctgatatcgatgactcatgggcctccataaagagcatcttggactggaccagtcggaatcaggagcgaattgtggatgtcgcaggccctggaggatggaacgatccagacatgctggtgatcggcaattttggcctctcttgggaccagcaggttacccaaatggctctgtgggcaattatggccggtcctcttttcatgagcaacgatctgcgcgcgatctcaccacaggcaaaggccctgctccaagacaaagatgtgatagccatcaatcaggacccgttgggaaagcagggctaccagctgagaaaaggcgacaactttgaggtctgggaaaggcctttgagtggagatgcgtgggctgtggccattattaatcggcaagagatcggaggtccacgcggttatacaattcctgtagcatctcttggcaagggcgttgcctgtaacccagcttgcttcatcactcagcttctgccggtgaagagaaaactgggtttctacgaagctaccagcaggctccgatcccacatcaaccctacaggaaccgtcctcttgcagctggagaatacgatgcagacttcactgaaggacctcctg

SEQ ID NO: 952 - protein, 398 aa, Artificial Sequence
  variant of human alpha-galactosidase A
LDNGLARTPPMGWLHWERFMCNLDCQEEPDSCISEKLFEEMAERMVTDGWKDAGYEYLCIDDCWMAPQRDSEGRLQADPQRFPHGIRQLANHVHSKGLKLGIYADVGNKTCAGFPGSFGYYDIDAQTFADWGVDLLKFDGCYCDSLENLADGYKHMSLALNKTGRPIVYSCEWPLYMWHFQKPNYTEIRQYCNHWRNFADIDDSWASIKSILDWTSRNQERIVDVAGPGGWNDPDMLVIGNFGLSWDQQVTQMALWAIMAGPLFMSNDLRAISPQAKALLQDKDVIAINQDPLGKQGYQLRKGDNFEVWERPLSGDAWAVAIINRQEIGGPRGYTIPVASLGKGVACNPACFITQLLPVKRKLGFYEATSRLRSHINPTGTVLLQLENTMQTSLKDLL

SEQ ID NO: 953 - DNA, 1194 bp, Artificial Sequence
  variant of human alpha-galactosidase A
ctggataatggattggctagaacacctcctatggggtggcttcactgggagaggttcatgtgcaacctggactgtcaggaagaaccagacagctgcatctccgagaagctctttgaggaaatggccgaacgaatggtgactgacggctggaaagatgcaggttacgagtatctgtgtattgacgattgctggatggccccacaacgggattctgagggaagacttcaggctgatccgcagcgcttccctcatggcataaggcagctggcaaaccacgtccacagtaaggggctcaaattgggaatctacgcggacgtgggcaataagacctgtgccggttttccgggatcattcgggtattatgacattgacgcccaaacgtttgctgattggggcgttgacctgctgaaattcgatggttgctactgtgacagcctcgaaaacctggcagacggctacaagcatatgtctctcgccctgaataaaaccggtcggccaatcgtatattcctgcgagtggcctctttacatgtggctgtttcagaaaccgaactacacagaaattcgccagtattgcaatcattggaggaacttcgctgatatcgatgactcatgggcctccataaagagcatcttggactggaccagtcggaatcaggagcgaattgtggatgtcgcaggccctggaggatggaacgatccagacatgctggtgatcggcaattttggcctctcttgggaccagcaggttacccaaatggctctgtgggcaattatggccggtcctcttttcatgagcaacgatctgcgcgcgatctcaccacaggcaaaggccctgctccaagacaaagatgtgatagccatcaatcaggacccgttgggaaagcagggctaccagctgagaaaaggcgacaactttgaggtctgggaaaggcctttgagtggagatgcgtgggctgtggccattattaatcggcaagagatcggaggtccacgcggttatacaattcctgtagcatctcttggcaagggcgttgcctgtaacccagcttgcttcatcactcagcttctgccggtgaagagaaaactgggtttctacgaagctaccagcaggctccgatcccacatcaaccctacaggaaccgtcctcttgcagctggagaatacgatgcagacttcactgaaggacctcctg

SEQ ID NO: 954 - protein, 398 aa, Artificial Sequence
  variant of human alpha-galactosidase A
LDNGLARTPPMGWLHWERFMCNLDCQEEPDSCISEKLFEEMAERMVTDGWKDAGYEYLCIDDCWMAPQRDSEGRLQADPQRFPHGIRQLANHVHSKGLKLGIYADVGNKTCAGFPGSFGYYDIDAQTFADWGVDLLKFDGCYCDSLENLADGYKHMSLALNKTGRPIVYSCEWPLYMWLFQKPNYTEIRQYCNHWRNFADIDDSWASIKSILDWTSRNQERIVDVAGPGGWNDPDMLVIGNFGLSWDQQVTQMALWAIMAGPLFMSNDLRAISPQAKALLQDKDVIAINQDPLGKQGYQLRKGDNFEVWERPLSGDAWAVAIINRQEIGGPRGYTIPVASLGKGVACNPACFITQLLPVKRKLGFYEATSRLRSHINPTGTVLLQLENTMQTSLKDLL

SEQ ID NO: 955 - DNA, 1194 bp, Artificial Sequence
  variant of human alpha-galactosidase A
ctggataatggattggctagaacacctcctatggggtggcttcactgggagaggttcatgtgcaacctggactgtcaggaagaaccagacagctgcatctccgagaagctctttgaggaaatggccgaacgaatggtgactgacggctggaaagatgcaggttacgagtatctgtgtattgacgattgctggatggccccacaacgggattctgagggaagacttcaggctgatccgcagcgcttccctcatggcataaggcagctggcaaaccacgtccacagtaaggggctcaaattgggaatctacgcggacgtgggcaataagacctgtgccggttttccgggatcattcgggtattatgacattgacgcccaaacgtttgctgattggggcgttgacctgctgaaattcgatggttgctactgtgacagcctcgaaaacctggcagacggctacaagcatatgtctctcgccctgaataaaaccggtcggccaatcgtatattcctgcgagtggcctctttacatgtggaggtttcagaaaccgaactacacagaaattcgccagtattgcaatcattggaggaacttcgctgatatcgatgactcatgggcctccataaagagcatcttggactggaccagtcggaatcaggagcgaattgtggatgtcgcaggccctggaggatggaacgatccagacatgctggtgatcggcaattttggcctctcttgggaccagcaggttacccaaatggctctgtgggcaattatggccggtcctcttttcatgagcaacgatctgcgcgcgatctcaccacaggcaaaggccctgctccaagacaaagatgtgatagccatcaatcaggacccgttgggaaagcagggctaccagctgagaaaaggcgacaactttgaggtctgggaaaggcctttgagtggagatgcgtgggctgtggccattattaatcggcaagagatcggaggtccacgcggttatacaattcctgtagcatctcttggcaagggcgttgcctgtaacccagcttgcttcatcactcagcttctgccggtgaagagaaaactgggtttctacgaagctaccagcaggctccgatcccacatcaaccctacaggaaccgtcctcttgcagctggagaatacgatgcagacttcactgaaggacctcctg

SEQ ID NO: 956 - protein, 398 aa, Artificial Sequence
  variant of human alpha-galactosidase A
LDNGLARTPPMGWLHWERFMCNLDCQEEPDSCISEKLFEEMAERMVTDGWKDAGYEYLCIDDCWMAPQRDSEGRLQADPQRFPHGIRQLANHVHSKGLKLGIYADVGNKTCAGFPGSFGYYDIDAQTFADWGVDLLKFDGCYCDSLENLADGYKHMSLALNKTGRPIVYSCEWPLYMWRFQKPNYTEIRQYCNHWRNFADIDDSWASIKSILDWTSRNQERIVDVAGPGGWNDPDMLVIGNFGLSWDQQVTQMALWAIMAGPLFMSNDLRAISPQAKALLQDKDVIAINQDPLGKQGYQLRKGDNFEVWERPLSGDAWAVAIINRQEIGGPRGYTIPVASLGKGVACNPACFITQLLPVKRKLGFYEATSRLRSHINPTGTVLLQLENTMQTSLKDLL

SEQ ID NO: 957 - DNA, 1194 bp, Artificial Sequence
  variant of human alpha-galactosidase A
ctggataatggattggctagaacacctcctatggggtggcttcactgggagaggttcatgtgcaacctggactgtcaggaagaaccagacagctgcatctccgagaagctctttgaggaaatggccgaacgaatggtgactgacggctggaaagatgcaggttacgagtatctgtgtattgacgattgctggatggccccacaacgggattctgagggaagacttcaggctgatccgcagcgcttccctcatggcataaggcagctggcaaaccacgtccacagtaaggggctcaaattgggaatctacgcggacgtgggcaataagacctgtgccggttttccgggatcattcgggtattatgacattgacgcccaaacgtttgctgattggggcgttgacctgctgaaattcgatggttgctactgtgacagcctcgaaaacctggcagacggctacaagcatatgtctctcgccctgaataaaaccggtcggccaatcgtatattcctgcgagtggcctctttacatgtggtggtttcagaaaccgaactacacagaaattcgccagtattgcaatcattggaggaacttcgctgatatcgatgactcatgggcctccataaagagcatcttggactggaccagtcggaatcaggagcgaattgtggatgtcgcaggccctggaggatggaacgatccagacatgctggtgatcggcaattttggcctctcttgggaccagcaggttacccaaatggctctgtgggcaattatggccggtcctcttttcatgagcaacgatctgcgcgcgatctcaccacaggcaaaggccctgctccaagacaaagatgtgatagccatcaatcaggacccgttgggaaagcagggctaccagctgagaaaaggcgacaactttgaggtctgggaaaggcctttgagtggagatgcgtgggctgtggccattattaatcggcaagagatcggaggtccacgcggttatacaattcctgtagcatctcttggcaagggcgttgcctgtaacccagcttgcttcatcactcagcttctgccggtgaagagaaaactgggtttctacgaagctaccagcaggctccgatcccacatcaaccctacaggaaccgtcctcttgcagctggagaatacgatgcagacttcactgaaggacctcctg

SEQ ID NO: 958 - protein, 398 aa, Artificial Sequence
  variant of human alpha-galactosidase A
LDNGLARTPPMGWLHWERFMCNLDCQEEPDSCISEKLFEEMAERMVTDGWKDAGYEYLCIDDCWMAPQRDSEGRLQADPQRFPHGIRQLANHVHSKGLKLGIYADVGNKTCAGFPGSFGYYDIDAQTFADWGVDLLKFDGCYCDSLENLADGYKHMSLALNKTGRPIVYSCEWPLYMWWFQKPNYTEIRQYCNHWRNFADIDDSWASIKSILDWTSRNQERIVDVAGPGGWNDPDMLVIGNFGLSWDQQVTQMALWAIMAGPLFMSNDLRAISPQAKALLQDKDVIAINQDPLGKQGYQLRKGDNFEVWERPLSGDAWAVAIINRQEIGGPRGYTIPVASLGKGVACNPACFITQLLPVKRKLGFYEATSRLRSHINPTGTVLLQLENTMQTSLKDLL

SEQ ID NO: 959 - DNA, 1194 bp, Artificial Sequence
  variant of human alpha-galactosidase A
ctggataatggattggctagaacacctcctatggggtggcttcactgggagaggttcatgtgcaacctggactgtcaggaagaaccagacagctgcatctccgagaagctctttgaggaaatggccgaacgaatggtgactgacggctggaaagatgcaggttacgagtatctgtgtattgacgattgctggatggccccacaacgggattctgagggaagacttcaggctgatccgcagcgcttccctcatggcataaggcagctggcaaaccacgtccacagtaaggggctcaaattgggaatctacgcggacgtgggcaataagacctgtgccggttttccgggatcattcgggtattatgacattgacgcccaaacgtttgctgattggggcgttgacctgctgaaattcgatggttgctactgtgacagcctcgaaaacctggcagacggctacaagcatatgtctctcgccctgaataaaaccggtcggccaatcgtatattcctgcgagtggcctctttacatgtggccatttcagaaaccgaactacacagaaattcgccagtattgcaatcattggaggaacttcgctgatatcgatgactcatgggcctccataaagagcatcttggactggaccagtcggaatcaggagcgaattgtggatgtcgcaggccctggaggatggaacgatccagacatgctggtgatcggcaattttggcctctcttgggaccagcaggttacccaaatggctctgtgggcaattatggccggtcctcttttcatgagcaacgatctgcgcgcgatctcaccacaggcaaaggccctgctccaagacaaagatgtgatagccatcaatcaggacccgttgggaaagcagggctaccagctgagaaaaggcgacaactttgaggtctgggaaaggcctttgagtggagatgcgtgggctgtggccattattaatcggcaagagatcggaggtatgcgcggttatacaattcctgtagcatctcttggcaagggcgttgcctgtaacccagcttgcttcatcactcagcttctgccggtgaagagaaaactgggtttctacgaagctaccagcaggctccgatcccacatcaaccctacaggaaccgtcctcttgcagctggagaatacgatgcagacttcactgaaggacctcctg

SEQ ID NO: 960 - protein, 398 aa, Artificial Sequence
  variant of human alpha-galactosidase A
LDNGLARTPPMGWLHWERFMCNLDCQEEPDSCISEKLFEEMAERMVTDGWKDAGYEYLCIDDCWMAPQRDSEGRLQADPQRFPHGIRQLANHVHSKGLKLGIYADVGNKTCAGFPGSFGYYDIDAQTFADWGVDLLKFDGCYCDSLENLADGYKHMSLALNKTGRPIVYSCEWPLYMWPFQKPNYTEIRQYCNHWRNFADIDDSWASIKSILDWTSRNQERIVDVAGPGGWNDPDMLVIGNFGLSWDQQVTQMALWAIMAGPLFMSNDLRAISPQAKALLQDKDVIAINQDPLGKQGYQLRKGDNFEVWERPLSGDAWAVAIINRQEIGGMRGYTIPVASLGKGVACNPACFITQLLPVKRKLGFYEATSRLRSHINPTGTVLLQLENTMQTSLKDLL

SEQ ID NO: 961 - DNA, 1194 bp, Artificial Sequence
  variant of human alpha-galactosidase A
ctggataatggattggctagaacacctcctatggggtggcttcactgggagaggttcatgtgcaacctggactgtcaggaagaaccagacagctgcatctccgagaagctctttgaggaaatggccgaacgaatggtgactgacggctggaaagatgcaggttacgagtatctgtgtattgacgattgctggatggccccacaacgggattctgagggaagacttcaggctgatccgcagcgcttccggcatggcataaggcagctggcaaaccacgtccacagtaaggggctcaaattgggaatctacgcggacgtgggcaataagacctgtgccggttttccgggatcattcgggtattatgacattgacgcccaaacgtttgctgattggggcgttgacctgctgaaattcgatggttgctactgtgacagcctcgaaaacctggcagacggctacaagcatatgtctctcgccctgaataaaaccggtcggccaatcgtatattcctgcgagtggcctctttacatgtggccatttcagaaaccgaactacacagaaattcgccagtattgcaatcattggaggaacttcgctgatatcgatgactcatgggcctccataaagagcatcttggactggaccagtcggaatcaggagcgaattgtggatgtcgcaggccctggaggatggaacgatccagacatgctggtgatcggcaattttggcctctcttgggaccagcaggttacccaaatggctctgtgggcaattatggccggtcctcttttcatgagcaacgatctgcgcgcgatctcaccacaggcaaaggccctgctccaagacaaagatgtgatagccatcaatcaggacccgttgggaaagcagggctaccagctgagaaaaggcgacaactttgaggtctgggaaaggcctttgagtggagatgcgtgggctgtggccattattaatcggcaagagatcggaggtccacgcggttatacaattcctgtagcatctcttggcaagggcgttgcctgtaacccagcttgcttcatcactcagcttctgccggtgaagagaaaactgggtttctacgaagctaccagcaggctccgatcccacatcaaccctacaggaaccgtcctcttgcagctggagaatacgatgcagacttcactgaaggacctcctg

SEQ ID NO: 962 - protein, 398 aa, Artificial Sequence
  variant of human alpha-galactosidase A
LDNGLARTPPMGWLHWERFMCNLDCQEEPDSCISEKLFEEMAERMVTDGWKDAGYEYLCIDDCWMAPQRDSEGRLQADPQRFRHGIRQLANHVHSKGLKLGIYADVGNKTCAGFPGSFGYYDIDAQTFADWGVDLLKFDGCYCDSLENLADGYKHMSLALNKTGRPIVYSCEWPLYMWPFQKPNYTEIRQYCNHWRNFADIDDSWASIKSILDWTSRNQERIVDVAGPGGWNDPDMLVIGNFGLSWDQQVTQMALWAIMAGPLFMSNDLRAISPQAKALLQDKDVIAINQDPLGKQGYQLRKGDNFEVWERPLSGDAWAVAIINRQEIGGPRGYTIPVASLGKGVACNPACFITQLLPVKRKLGFYEATSRLRSHINPTGTVLLQLENTMQTSLKDLL

SEQ ID NO: 963 - DNA, 1194 bp, Artificial Sequence
  variant of human alpha-galactosidase A
ctggataatggattggctagaacacctcctatggggtggcttcactgggagaggttcatgtgcaacctggactgtcaggaagaaccagacagctgcatctccgagaagctctttgaggaaatggccgaacgaatggtgactgacggctggaaagatgcaggttacgagtatctgtgtattgacgattgctggatggccccacaacgggattctgagggaagacttcaggctgatccgcagcgcttctctcatggcataaggcagctggcaaaccacgtccacagtaaggggctcaaattgggaatctacgcggacgtgggcaataagacctgtgccggttttccgggatcattcgggtattatgacattgacgcccaaacgtttgctgattggggcgttgacctgctgaaattcgatggttgctactgtgacagcctcgaaaacctggcagacggctacaagcatatgtctctcgccctgaataaaaccggtcggccaatcgtatattcctgcgagtggcctctttacatgtggccatttcagaaaccgaactacacagaaattcgccagtattgcaatcattggaggaacttcgctgatatcgatgactcatgggcctccataaagagcatcttggactggaccagtcggaatcaggagcgaattgtggatgtcgcaggccctggaggatggaacgatccagacatgctggtgatcggcaattttggcctctcttgggaccagcaggttacccaaatggctctgtgggcaattatggccggtcctcttttcatgagcaacgatctgcgcgcgatctcaccacaggcaaaggccctgctccaagacaaagatgtgatagccatcaatcaggacccgttgggaaagcagggctaccagctgagaaaaggcgacaactttgaggtctgggaaaggcctttgagtggagatgcgtgggctgtggccattattaatcggcaagagatcggaggtccacgcggttatacaattcctgtagcatctcttggcaagggcgttgcctgtaacccagcttgcttcatcactcagcttctgccggtgaagagaaaactgggtttctacgaagctaccagcaggctccgatcccacatcaaccctacaggaaccgtcctcttgcagctggagaatacgatgcagacttcactgaaggacctcctg

SEQ ID NO: 964 - protein, 398 aa, Artificial Sequence
  variant of human alpha-galactosidase A
LDNGLARTPPMGWLHWERFMCNLDCQEEPDSCISEKLFEEMAERMVTDGWKDAGYEYLCIDDCWMAPQRDSEGRLQADPQRFSHGIRQLANHVHSKGLKLGIYADVGNKTCAGFPGSFGYYDIDAQTFADWGVDLLKFDGCYCDSLENLADGYKHMSLALNKTGRPIVYSCEWPLYMWPFQKPNYTEIRQYCNHWRNFADIDDSWASIKSILDWTSRNQERIVDVAGPGGWNDPDMLVIGNFGLSWDQQVTQMALWAIMAGPLFMSNDLRAISPQAKALLQDKDVIAINQDPLGKQGYQLRKGDNFEVWERPLSGDAWAVAIINRQEIGGPRGYTIPVASLGKGVACNPACFITQLLPVKRKLGFYEATSRLRSHINPTGTVLLQLENTMQTSLKDLL

SEQ ID NO: 965 - DNA, 1194 bp, Artificial Sequence
  variant of human alpha-galactosidase A
ctggataatggattggctagaacacctcctatggggtggcttcactgggagaggttcatgtgcaacctggactgtcaggaagaaccagacagctgcatctccgagaagctctttgaggaaatggccgaacgaatggtgactgacggctggaaagatgcaggttacgagtatctgtgtattgacgattgctggatggccccacaacgggattctgagggaagacttcaggctgatccgcagcgcttccctcatggcataaggcagctggcaaaccacgtccacagtaaggggctcaaattgggaatctacgcggacgtgggcaataagacctgtgccggttttccgggatcattcgggtattatgacattgacgcccaaacgtttgctgattggggcgttgacctgctgaaattcgatggttgctactgtgacagcctcgaaaacctggcagacggctacaagcatatgtctctcgccctgaataaaaccggtcggccaatcgtatattcctgcgagtggcctctttacatgtggccatttcagaaaccgaactacacagaaattcgccagtattgcaatcattggaggaacttcgctgatatcgatgactcatgggcctccataaagagcatcttggactggaccagtcggaatcaggagcgaattgtggatgtcgcaggccctggaggatggaacgatccagacatgctggtgatcggcaattttggcctctcttgggaccagcaggttacccaaatggctctgtgggcaattatggccggtcctcttttcatgagcaacgatctgcgcgcgatctcaccagcggcaaaggccctgctccaagacaaagatgtgatagccatcaatcaggacccgttgggaaagcagggctaccagctgagaaaaggcgacaactttgaggtctgggaaaggcctttgagtggagatgcgtgggctgtggccattattaatcggcaagagatcggaggtccacgcggttatacaattcctgtagcatctcttggcaagggcgttgcctgtaacccagcttgcttcatcactcagcttctgccggtgaagagaaaactgggtttctacgaagctaccagcaggctccgatcccacatcaaccctacaggaaccgtcctcttgcagctggagaatacgatgcagacttcactgaaggacctcctg

SEQ ID NO: 966 - protein, 398 aa, Artificial Sequence
  variant of human alpha-galactosidase A
LDNGLARTPPMGWLHWERFMCNLDCQEEPDSCISEKLFEEMAERMVTDGWKDAGYEYLCIDDCWMAPQRDSEGRLQADPQRFPHGIRQLANHVHSKGLKLGIYADVGNKTCAGFPGSFGYYDIDAQTFADWGVDLLKFDGCYCDSLENLADGYKHMSLALNKTGRPIVYSCEWPLYMWPFQKPNYTEIRQYCNHWRNFADIDDSWASIKSILDWTSRNQERIVDVAGPGGWNDPDMLVIGNFGLSWDQQVTQMALWAIMAGPLFMSNDLRAISPAAKALLQDKDVIAINQDPLGKQGYQLRKGDNFEVWERPLSGDAWAVAIINRQEIGGPRGYTIPVASLGKGVACNPACFITQLLPVKRKLGFYEATSRLRSHINPTGTVLLQLENTMQTSLKDLL

SEQ ID NO: 967 - DNA, 1194 bp, Artificial Sequence
  variant of human alpha-galactosidase A
ctggataatggattggctagaacacctcctatggggtggcttcactgggagaggttcatgtgcaacctggactgtcaggaagaaccagacagctgcatctccgagaagctctttgaggaaatggccgaacgaatggtgactgacggctggaaagatgcaggttacgagtatctgtgtattgacgattgctggatggccccacaacgggattctgagggaagacttcaggctgatccgcagcgcttccctcatggcataaggcagctggcaaaccacgtccacagtaaggggctcaaattgggaatctacgcggacgtgggcaataagacctgtgccggttttccgggatcattcgggtattatgacattgacgcccaaacgtttgctgattggggcgttgacctgctgaaattcgatggttgctactgtgacagcctcgaaaacctggcagacggctacaagcatatgtctctcgccctgaataaaaccggtcggccaatcgtatattcctgcgagtggcctctttacatgtggccatttcagaaaccgaactacacagaaattcgccagtattgcaatcattggaggaacttcgctgatatcgatgactcatgggcctccataaagagcatcttggactggaccagtcggaatcaggagcgaattgtggatgtcgcaggccctggaggatggaacgatccagacatgctggtgatcggcaattttggcctctcttgggaccagcaggttacccaaatggctctgtgggcaattatggccggtcctcttttcatgagcaacgatctgcgcgcgatctcaccaggtgcaaaggccctgctccaagacaaagatgtgatagccatcaatcaggacccgttgggaaagcagggctaccagctgagaaaaggcgacaactttgaggtctgggaaaggcctttgagtggagatgcgtgggctgtggccattattaatcggcaagagatcggaggtccacgcggttatacaattcctgtagcatctcttggcaagggcgttgcctgtaacccagcttgcttcatcactcagcttctgccggtgaagagaaaactgggtttctacgaagctaccagcaggctccgatcccacatcaaccctacaggaaccgtcctcttgcagctggagaatacgatgcagacttcactgaaggacctcctg

SEQ ID NO: 968 - protein, 398 aa, Artificial Sequence
  variant of human alpha-galactosidase A
LDNGLARTPPMGWLHWERFMCNLDCQEEPDSCISEKLFEEMAERMVTDGWKDAGYEYLCIDDCWMAPQRDSEGRLQADPQRFPHGIRQLANHVHSKGLKLGIYADVGNKTCAGFPGSFGYYDIDAQTFADWGVDLLKFDGCYCDSLENLADGYKHMSLALNKTGRPIVYSCEWPLYMWPFQKPNYTEIRQYCNHWRNFADIDDSWASIKSILDWTSRNQERIVDVAGPGGWNDPDMLVIGNFGLSWDQQVTQMALWAIMAGPLFMSNDLRAISPGAKALLQDKDVIAINQDPLGKQGYQLRKGDNFEVWERPLSGDAWAVAIINRQEIGGPRGYTIPVASLGKGVACNPACFITQLLPVKRKLGFYEATSRLRSHINPTGTVLLQLENTMQTSLKDLL

SEQ ID NO: 969 - DNA, 1194 bp, Artificial Sequence
  variant of human alpha-galactosidase A
ctggataatggattggctagaacacctcctatggggtggcttcactgggagaggttcatgtgcaacctggactgtcaggaagaaccagacagctgcatctccgagaagctctttgaggaaatggccgaacgaatggtgactgacggctggaaagatgcaggttacgagtatctgtgtattgacgattgctggatggccccacaacgggattctgagggaagacttcaggctgatccgcagcgcttccctcatggcataaggcagctggcaaaccacgtccacagtaaggggctcaaattgggaatctacgcggacgtgggcaataagacctgtgccggttttccgggatcattcgggtattatgacattgacgcccaaacgtttgctgattggggcgttgacctgctgaaattcgatggttgctactgtgacagcctcgaaaacctggcagacggctacaagcatatgtctctcgccctgaataaaaccggtcggccaatcgtatattcctgcgagtggcctctttacatgtggccatttcagaaaccgaactacacagaaattcgccagtattgcaatcattggaggaacttcgctgatatcgatgactcatgggcctccataaagagcatcttggactggaccagtcggaatcaggagcgaattgtggatgtcgcaggccctggaggatggaacgatccagacatgctggtgatcggcaattttggcctctcttgggaccagcaggttacccaaatggctctgtgggcaattatggccggtcctcttttcatgagcaacgatctgcgcgcgatctcaccacaggcaaaggccctgctcattgacaaagatgtgatagccatcaatcaggacccgttgggaaagcagggctaccagctgagaaaaggcgacaactttgaggtctgggaaaggcctttgagtggagatgcgtgggctgtggccattattaatcggcaagagatcggaggtccacgcggttatacaattcctgtagcatctcttggcaagggcgttgcctgtaacccagcttgcttcatcactcagcttctgccggtgaagagaaaactgggtttctacgaagctaccagcaggctccgatcccacatcaaccctacaggaaccgtcctcttgcagctggagaatacgatgcagacttcactgaaggacctcctg

SEQ ID NO: 970 - protein, 398 aa, Artificial Sequence
  variant of human alpha-galactosidase A
LDNGLARTPPMGWLHWERFMCNLDCQEEPDSCISEKLFEEMAERMVTDGWKDAGYEYLCIDDCWMAPQRDSEGRLQADPQRFPHGIRQLANHVHSKGLKLGIYADVGNKTCAGFPGSFGYYDIDAQTFADWGVDLLKFDGCYCDSLENLADGYKHMSLALNKTGRPIVYSCEWPLYMWPFQKPNYTEIRQYCNHWRNFADIDDSWASIKSILDWTSRNQERIVDVAGPGGWNDPDMLVIGNFGLSWDQQVTQMALWAIMAGPLFMSNDLRAISPQAKALLIDKDVIAINQDPLGKQGYQLRKGDNFEVWERPLSGDAWAVAIINRQEIGGPRGYTIPVASLGKGVACNPACFITQLLPVKRKLGFYEATSRLRSHINPTGTVLLQLENTMQTSLKDLL

SEQ ID NO: 971 - DNA, 1194 bp, Artificial Sequence
  variant of human alpha-galactosidase A
ctggataatggattggctagaacacctcctatggggtggcttcactgggagaggttcatgtgcaacctggactgtcaggaagaaccagacagctgcatctccgagaagctctttgaggaaatggccgaacgaatggtgactgacggctggaaagatgcaggttacgagtatctgtgtattgacgattgctggatggccccacaacgggattctgagggaagacttcaggctgatccgcagcgcttccctcatggcataaggcagctggcaaaccacgtccacagtaaggggctcaaattgggaatctacgcggacgtgggcaataagacctgtgccggttttccgggatcattcgggtattatgacattgacgcccaaacgtttgctgattggggcgttgacctgctgaaattcgatggttgctactgtgacagcctcgaaaacctggcagacggctacaagcatatgtctctcgccctgaataaaaccggtcggccaatcgtatattcctgcgagtggcctctttacatgtggccatttcagaaaccgaactacacagaaattcgccagtattgcaatcattggaggaacttcgctgatatcgatgactcatgggcctccataaagagcatcttggactggaccagtcggaatcaggagcgaattgtggatgtcgcaggccctggaggatggaacgatccagacatgctggtgatcggcaattttggcctctcttgggaccagcaggttacccaaatggctctgtgggcaattatggccggtcctcttttcatgagcaacgatctgcgcgcgatctcaccacaggcaaaggccctgctcatggacaaagatgtgatagccatcaatcaggacccgttgggaaagcagggctaccagctgagaaaaggcgacaactttgaggtctgggaaaggcctttgagtggagatgcgtgggctgtggccattattaatcggcaagagatcggaggtccacgcggttatacaattcctgtagcatctcttggcaagggcgttgcctgtaacccagcttgcttcatcactcagcttctgccggtgaagagaaaactgggtttctacgaagctaccagcaggctccgatcccacatcaaccctacaggaaccgtcctcttgcagctggagaatacgatgcagacttcactgaaggacctcctg

SEQ ID NO: 972 - protein, 398 aa, Artificial Sequence
  variant of human alpha-galactosidase A
LDNGLARTPPMGWLHWERFMCNLDCQEEPDSCISEKLFEEMAERMVTDGWKDAGYEYLCIDDCWMAPQRDSEGRLQADPQRFPHGIRQLANHVHSKGLKLGIYADVGNKTCAGFPGSFGYYDIDAQTFADWGVDLLKFDGCYCDSLENLADGYKHMSLALNKTGRPIVYSCEWPLYMWPFQKPNYTEIRQYCNHWRNFADIDDSWASIKSILDWTSRNQERIVDVAGPGGWNDPDMLVIGNFGLSWDQQVTQMALWAIMAGPLFMSNDLRAISPQAKALLMDKDVIAINQDPLGKQGYQLRKGDNFEVWERPLSGDAWAVAIINRQEIGGPRGYTIPVASLGKGVACNPACFITQLLPVKRKLGFYEATSRLRSHINPTGTVLLQLENTMQTSLKDLL

SEQ ID NO: 973 - DNA, 1194 bp, Artificial Sequence
  variant of human alpha-galactosidase A
ctggataatggattggctagaacacctcctatggggtggcttcactgggagaggttcatgtgcaacctggactgtcaggaagaaccagacagctgcatctccgagaagctctttgaggaaatggccgaacgaatggtgactgacggctggaaagatgcaggttacgagtatctgtgtattgacgattgctggatggccccacaacgggattctgagggaagacttcaggctgatccgcagcgcttccctcatggcataaggcagctggcaaaccacgtccacagtaaggggctcaaattgggaatctacgcggacgtgggcaataagacctgtgccggttttccgggatcattcgggtattatgacattgacgcccaaacgtttgctgattggggcgttgacctgctgaaattcgatggttgctactgtgacagcctcgaaaacctggcagacggctacaagcatatgtctctcgccctgaataaaaccggtcggccaatcgtatattcctgcgagtggcctctttacatgtggccatttcagaaaccgaactacacagaaattcgccagtattgcaatcattggaggaacttcgctgatatcgatgactcatgggcctccataaagagcatcttggactggaccagtcggaatcaggagcgaattgtggatgtcgcaggccctggaggatggaacgatccagacatgctggtgatcggcaattttggcctctcttgggaccagcaggttacccaaatggctctgtgggcaattatggccggtcctcttttcatgagcaacgatctgcgcgcgatctcaccacaggcaaaggccctgctccaagacaaagatgtgatagccatcaatcaggacccgttgggaaagcagggctaccagctgagaaaaggcgacaactttgaggtctgggaaaggcctttgagtggagatgcgtgggctgtggccattattaatcggcaagagatcggaggtccacgcggttatacaattcctgtagcatctcttggcaagggcgttgcctgtaacccagcttgcttcatcactcagcttctgccggtgaagagaaaactgggtttctacgaagctaccagcaggctccgatcccacatcaaccctacaggaaccgtcctcttgaggctggagaatacgatgcagacttcactgaaggacctcctg

SEQ ID NO: 974 - protein, 398 aa, Artificial Sequence
  variant of human alpha-galactosidase A
LDNGLARTPPMGWLHWERFMCNLDCQEEPDSCISEKLFEEMAERMVTDGWKDAGYEYLCIDDCWMAPQRDSEGRLQADPQRFPHGIRQLANHVHSKGLKLGIYADVGNKTCAGFPGSFGYYDIDAQTFADWGVDLLKFDGCYCDSLENLADGYKHMSLALNKTGRPIVYSCEWPLYMWPFQKPNYTEIRQYCNHWRNFADIDDSWASIKSILDWTSRNQERIVDVAGPGGWNDPDMLVIGNFGLSWDQQVTQMALWAIMAGPLFMSNDLRAISPQAKALLQDKDVIAINQDPLGKQGYQLRKGDNFEVWERPLSGDAWAVAIINRQEIGGPRGYTIPVASLGKGVACNPACFITQLLPVKRKLGFYEATSRLRSHINPTGTVLLRLENTMQTSLKDLL

SEQ ID NO: 975 - DNA, 1194 bp, Artificial Sequence
  variant of human alpha-galactosidase A
ctggataatggattggctagaacacctcctatggggtggcttcactgggagaggttcatgtgcaacctggactgtcaggaagaaccagacagctgcatctccgagaagctctttgaggaaatggccgaacgaatggtgactgacggctggaaagatgcaggttacgagtatctgtgtattgacgattgctggatggccccacaacgggattctgagggaagacttgcggctgatccgcagcgcttccctcatggcataaggcagctggcaaaccacgtccacagtaaggggctcaaattgggaatctacgcggacgtgggcaataagacctgtgccggttttccgggatcattcgggtattatgacattgacgcccaaacgtttgctgattggggcgttgacctgctgaaattcgatggttgctactgtgacagcctcgaaaacctggcagacggctacaagcatatgtctctcgccctgaataaaaccggtcggccaatcgtatattcctgcgagtggcctctttacatgtggccatttcagaaaccgaactacacagaaattcgccagtattgcaatcattggaggaacttcgctgatatcgatgactcatgggcctccataaagagcatcttggactggaccagtcggaatcaggagcgaattgtggatgtcgcaggccctggaggatggaacgatccagacatgctggtgatcggcaattttggcctctcttgggaccagcaggttacccaaatggctctgtgggcaattatggccggtcctcttttcatgagcaacgatctgcgcgcgatctcaccacaggcaaaggccctgctccaagacaaagatgtgatagccatcaatcaggacccgttgggaaagcagggctaccagctgagaaaaggcgacaactttgaggtctgggaaaggcctttgagtggagatgcgtgggctgtggccattattaatcggcaagagatcggaggtccacgcggttatacaattcctgtagcatctcttggcaagggcgttgcctgtaacccagcttgcttcatcactcagcttctgccggtgaagagaaaactgggtttctacgaagctaccagcaggctccgatcccacatcaaccctacaggaaccgtcctcttgcagctggagaatacgatgcagacttcactgaaggacctcctg

SEQ ID NO: 976 - protein, 398 aa, Artificial Sequence
  variant of human alpha-galactosidase A
LDNGLARTPPMGWLHWERFMCNLDCQEEPDSCISEKLFEEMAERMVTDGWKDAGYEYLCIDDCWMAPQRDSEGRLAADPQRFPHGIRQLANHVHSKGLKLGIYADVGNKTCAGFPGSFGYYDIDAQTFADWGVDLLKFDGCYCDSLENLADGYKHMSLALNKTGRPIVYSCEWPLYMWPFQKPNYTEIRQYCNHWRNFADIDDSWASIKSILDWTSRNQERIVDVAGPGGWNDPDMLVIGNFGLSWDQQVTQMALWAIMAGPLFMSNDLRAISPQAKALLQDKDVIAINQDPLGKQGYQLRKGDNFEVWERPLSGDAWAVAIINRQEIGGPRGYTIPVASLGKGVACNPACFITQLLPVKRKLGFYEATSRLRSHINPTGTVLLQLENTMQTSLKDLL

SEQ ID NO: 977 - DNA, 1194 bp, Artificial Sequence
  variant of human alpha-galactosidase A
ctggataatggattggctagaacacctcctatggggtggcttcactgggagaggttcatgtgcaacctggactgtcaggaagaaccagacagctgcatctccgagaagctctttgaggaaatggccgaacgaatggtgactgacggctggaaagatgcaggttacgagtatctgtgtattgacgattgctggatggccccacaacgggattctgagggaagactttttgctgatccgcagcgcttccctcatggcataaggcagctggcaaaccacgtccacagtaaggggctcaaattgggaatctacgcggacgtgggcaataagacctgtgccggttttccgggatcattcgggtattatgacattgacgcccaaacgtttgctgattggggcgttgacctgctgaaattcgatggttgctactgtgacagcctcgaaaacctggcagacggctacaagcatatgtctctcgccctgaataaaaccggtcggccaatcgtatattcctgcgagtggcctctttacatgtggccatttcagaaaccgaactacacagaaattcgccagtattgcaatcattggaggaacttcgctgatatcgatgactcatgggcctccataaagagcatcttggactggaccagtcggaatcaggagcgaattgtggatgtcgcaggccctggaggatggaacgatccagacatgctggtgatcggcaattttggcctctcttgggaccagcaggttacccaaatggctctgtgggcaattatggccggtcctcttttcatgagcaacgatctgcgcgcgatctcaccacaggcaaaggccctgctccaagacaaagatgtgatagccatcaatcaggacccgttgggaaagcagggctaccagctgagaaaaggcgacaactttgaggtctgggaaaggcctttgagtggagatgcgtgggctgtggccattattaatcggcaagagatcggaggtccacgcggttatacaattcctgtagcatctcttggcaagggcgttgcctgtaacccagcttgcttcatcactcagcttctgccggtgaagagaaaactgggtttctacgaagctaccagcaggctccgatcccacatcaaccctacaggaaccgtcctcttgcagctggagaatacgatgcagacttcactgaaggacctcctg

SEQ ID NO: 978 - protein, 398 aa, Artificial Sequence
  variant of human alpha-galactosidase A
LDNGLARTPPMGWLHWERFMCNLDCQEEPDSCISEKLFEEMAERMVTDGWKDAGYEYLCIDDCWMAPQRDSEGRLFADPQRFPHGIRQLANHVHSKGLKLGIYADVGNKTCAGFPGSFGYYDIDAQTFADWGVDLLKFDGCYCDSLENLADGYKHMSLALNKTGRPIVYSCEWPLYMWPFQKPNYTEIRQYCNHWRNFADIDDSWASIKSILDWTSRNQERIVDVAGPGGWNDPDMLVIGNFGLSWDQQVTQMALWAIMAGPLFMSNDLRAISPQAKALLQDKDVIAINQDPLGKQGYQLRKGDNFEVWERPLSGDAWAVAIINRQEIGGPRGYTIPVASLGKGVACNPACFITQLLPVKRKLGFYEATSRLRSHINPTGTVLLQLENTMQTSLKDLL

SEQ ID NO: 979 - DNA, 1194 bp, Artificial Sequence
  variant of human alpha-galactosidase A
ctggataatggattggctagaacacctcctatggggtggcttcactgggagaggttcatgtgcaacctggactgtcaggaagaaccagacagctgcatctccgagaagctctttgaggaaatggccgaacgaatggtgactgacggctggaaagatgcaggttacgagtatctgtgtattgacgattgctggatggccccacaacgggattctgagggaagacttatggctgatccgcagcgcttccctcatggcataaggcagctggcaaaccacgtccacagtaaggggctcaaattgggaatctacgcggacgtgggcaataagacctgtgccggttttccgggatcattcgggtattatgacattgacgcccaaacgtttgctgattggggcgttgacctgctgaaattcgatggttgctactgtgacagcctcgaaaacctggcagacggctacaagcatatgtctctcgccctgaataaaaccggtcggccaatcgtatattcctgcgagtggcctctttacatgtggccatttcagaaaccgaactacacagaaattcgccagtattgcaatcattggaggaacttcgctgatatcgatgactcatgggcctccataaagagcatcttggactggaccagtcggaatcaggagcgaattgtggatgtcgcaggccctggaggatggaacgatccagacatgctggtgatcggcaattttggcctctcttgggaccagcaggttacccaaatggctctgtgggcaattatggccggtcctcttttcatgagcaacgatctgcgcgcgatctcaccacaggcaaaggccctgctccaagacaaagatgtgatagccatcaatcaggacccgttgggaaagcagggctaccagctgagaaaaggcgacaactttgaggtctgggaaaggcctttgagtggagatgcgtgggctgtggccattattaatcggcaagagatcggaggtccacgcggttatacaattcctgtagcatctcttggcaagggcgttgcctgtaacccagcttgcttcatcactcagcttctgccggtgaagagaaaactgggtttctacgaagctaccagcaggctccgatcccacatcaaccctacaggaaccgtcctcttgcagctggagaatacgatgcagacttcactgaaggacctcctg

SEQ ID NO: 980 - protein, 398 aa, Artificial Sequence
  variant of human alpha-galactosidase A
LDNGLARTPPMGWLHWERFMCNLDCQEEPDSCISEKLFEEMAERMVTDGWKDAGYEYLCIDDCWMAPQRDSEGRLMADPQRFPHGIRQLANHVHSKGLKLGIYADVGNKTCAGFPGSFGYYDIDAQTFADWGVDLLKFDGCYCDSLENLADGYKHMSLALNKTGRPIVYSCEWPLYMWPFQKPNYTEIRQYCNHWRNFADIDDSWASIKSILDWTSRNQERIVDVAGPGGWNDPDMLVIGNFGLSWDQQVTQMALWAIMAGPLFMSNDLRAISPQAKALLQDKDVIAINQDPLGKQGYQLRKGDNFEVWERPLSGDAWAVAIINRQEIGGPRGYTIPVASLGKGVACNPACFITQLLPVKRKLGFYEATSRLRSHINPTGTVLLQLENTMQTSLKDLL

SEQ ID NO: 981 - DNA, 1194 bp, Artificial Sequence
  variant of human alpha-galactosidase A
ctggataatggattggctagaacacctcctatggggtggcttcactgggagaggttcatgtgcaacctggactgtcaggaagaaccagacagctgcatctccgagaagctctttgaggaaatggccgaacgaatggtgactgacggctggaaagatgcaggttacgagtatctgtgtattgacgattgctggatggccccacaacgggattctgagggaagactttcggctgatccgcagcgcttccctcatggcataaggcagctggcaaaccacgtccacagtaaggggctcaaattgggaatctacgcggacgtgggcaataagacctgtgccggttttccgggatcattcgggtattatgacattgacgcccaaacgtttgctgattggggcgttgacctgctgaaattcgatggttgctactgtgacagcctcgaaaacctggcagacggctacaagcatatgtctctcgccctgaataaaaccggtcggccaatcgtatattcctgcgagtggcctctttacatgtggccatttcagaaaccgaactacacagaaattcgccagtattgcaatcattggaggaacttcgctgatatcgatgactcatgggcctccataaagagcatcttggactggaccagtcggaatcaggagcgaattgtggatgtcgcaggccctggaggatggaacgatccagacatgctggtgatcggcaattttggcctctcttgggaccagcaggttacccaaatggctctgtgggcaattatggccggtcctcttttcatgagcaacgatctgcgcgcgatctcaccacaggcaaaggccctgctccaagacaaagatgtgatagccatcaatcaggacccgttgggaaagcagggctaccagctgagaaaaggcgacaactttgaggtctgggaaaggcctttgagtggagatgcgtgggctgtggccattattaatcggcaagagatcggaggtccacgcggttatacaattcctgtagcatctcttggcaagggcgttgcctgtaacccagcttgcttcatcactcagcttctgccggtgaagagaaaactgggtttctacgaagctaccagcaggctccgatcccacatcaaccctacaggaaccgtcctcttgcagctggagaatacgatgcagacttcactgaaggacctcctg

SEQ ID NO: 982 - protein, 398 aa, Artificial Sequence
  variant of human alpha-galactosidase A
LDNGLARTPPMGWLHWERFMCNLDCQEEPDSCISEKLFEEMAERMVTDGWKDAGYEYLCIDDCWMAPQRDSEGRLSADPQRFPHGIRQLANHVHSKGLKLGIYADVGNKTCAGFPGSFGYYDIDAQTFADWGVDLLKFDGCYCDSLENLADGYKHMSLALNKTGRPIVYSCEWPLYMWPFQKPNYTEIRQYCNHWRNFADIDDSWASIKSILDWTSRNQERIVDVAGPGGWNDPDMLVIGNFGLSWDQQVTQMALWAIMAGPLFMSNDLRAISPQAKALLQDKDVIAINQDPLGKQGYQLRKGDNFEVWERPLSGDAWAVAIINRQEIGGPRGYTIPVASLGKGVACNPACFITQLLPVKRKLGFYEATSRLRSHINPTGTVLLQLENTMQTSLKDLL

SEQ ID NO: 983 - DNA, 1194 bp, Artificial Sequence
  variant of human alpha-galactosidase A
ctggataatggattggctagaacacctcctatggggtggcttcactgggagaggttcatgtgcaacctggactgtcaggaagaaccagacagctgcatctccgagaagctctttgaggaaatggccgaacgaatggtgactgacggctggaaagatgcaggttacgagtatctgtgtattgacgattgctggatggccccacaacgggattctgagggaagacttcaggctgatccgacgcgcttccctcatggcataaggcagctggcaaaccacgtccacagtaaggggctcaaattgggaatctacgcggacgtgggcaataagacctgtgccggttttccgggatcattcgggtattatgacattgacgcccaaacgtttgctgattggggcgttgacctgctgaaattcgatggttgctactgtgacagcctcgaaaacctggcagacggctacaagcatatgtctctcgccctgaataaaaccggtcggccaatcgtatattcctgcgagtggcctctttacatgtggccatttcagaaaccgaactacacagaaattcgccagtattgcaatcattggaggaacttcgctgatatcgatgactcatgggcctccataaagagcatcttggactggaccagtcggaatcaggagcgaattgtggatgtcgcaggccctggaggatggaacgatccagacatgctggtgatcggcaattttggcctctcttgggaccagcaggttacccaaatggctctgtgggcaattatggccggtcctcttttcatgagcaacgatctgcgcgcgatctcaccacaggcaaaggccctgctccaagacaaagatgtgatagccatcaatcaggacccgttgggaaagcagggctaccagctgagaaaaggcgacaactttgaggtctgggaaaggcctttgagtggagatgcgtgggctgtggccattattaatcggcaagagatcggaggtccacgcggttatacaattcctgtagcatctcttggcaagggcgttgcctgtaacccagcttgcttcatcactcagcttctgccggtgaagagaaaactgggtttctacgaagctaccagcaggctccgatcccacatcaaccctacaggaaccgtcctcttgcagctggagaatacgatgcagacttcactgaaggacctcctg

SEQ ID NO: 984 - protein, 398 aa, Artificial Sequence
  variant of human alpha-galactosidase A
LDNGLARTPPMGWLHWERFMCNLDCQEEPDSCISEKLFEEMAERMVTDGWKDAGYEYLCIDDCWMAPQRDSEGRLQADPTRFPHGIRQLANHVHSKGLKLGIYADVGNKTCAGFPGSFGYYDIDAQTFADWGVDLLKFDGCYCDSLENLADGYKHMSLALNKTGRPIVYSCEWPLYMWPFQKPNYTEIRQYCNHWRNFADIDDSWASIKSILDWTSRNQERIVDVAGPGGWNDPDMLVIGNFGLSWDQQVTQMALWAIMAGPLFMSNDLRAISPQAKALLQDKDVIAINQDPLGKQGYQLRKGDNFEVWERPLSGDAWAVAIINRQEIGGPRGYTIPVASLGKGVACNPACFITQLLPVKRKLGFYEATSRLRSHINPTGTVLLQLENTMQTSLKDLL

SEQ ID NO: 985 - DNA, 1194 bp, Artificial Sequence
  variant of human alpha-galactosidase A
ctggataatggattggctagaacacctcctatggggtggcttcactgggagaggttcatgtgcaacctggactgtcaggaagaaccagacagctgcatctccgagaagctctttgaggaaatggccgaacgaatggtgactgacggctggaaagatgcaggttacgagtatctgtgtattgacgattgctggatggccccacaacgggattctgagggaagacttcaggctgatccgcagcgcttccctcatggcataaggcagctggcaaaccacgtccacagtaaggggctcaaattgggaatctacgcggacgtgggcaataagacctgtgccggttttccgggatcattcgggtattatgacattgacgcccaaacgtttgctgattggggcgttgacctgctgaaattcgatggttgctactgtgacagcctcgaaaacctggcagacggctacaagcatatgtctctcgccctgaataaaaccggtattccaatcgtatattcctgcgagtggcctctttacatgtggccatttcagaaaccgaactacacagaaattcgccagtattgcaatcattggaggaacttcgctgatatcgatgactcatgggcctccataaagagcatcttggactggaccagtcggaatcaggagcgaattgtggatgtcgcaggccctggaggatggaacgatccagacatgctggtgatcggcaattttggcctctcttgggaccagcaggttacccaaatggctctgtgggcaattatggccggtcctcttttcatgagcaacgatctgcgcgcgatctcaccacaggcaaaggccctgctccaagacaaagatgtgatagccatcaatcaggacccgttgggaaagcagggctaccagctgagaaaaggcgacaactttgaggtctgggaaaggcctttgagtggagatgcgtgggctgtggccattattaatcggcaagagatcggaggtccacgcggttatacaattcctgtagcatctcttggcaagggcgttgcctgtaacccagcttgcttcatcactcagcttctgccggtgaagagaaaactgggtttctacgaagctaccagcaggctccgatcccacatcaaccctacaggaaccgtcctcttgcagctggagaatacgatgcagacttcactgaaggacctcctg

SEQ ID NO: 986 - protein, 398 aa, Artificial Sequence
  variant of human alpha-galactosidase A
LDNGLARTPPMGWLHWERFMCNLDCQEEPDSCISEKLFEEMAERMVTDGWKDAGYEYLCIDDCWMAPQRDSEGRLQADPQRFPHGIRQLANHVHSKGLKLGIYADVGNKTCAGFPGSFGYYDIDAQTFADWGVDLLKFDGCYCDSLENLADGYKHMSLALNKTGIPIVYSCEWPLYMWPFQKPNYTEIRQYCNHWRNFADIDDSWASIKSILDWTSRNQERIVDVAGPGGWNDPDMLVIGNFGLSWDQQVTQMALWAIMAGPLFMSNDLRAISPQAKALLQDKDVIAINQDPLGKQGYQLRKGDNFEVWERPLSGDAWAVAIINRQEIGGPRGYTIPVASLGKGVACNPACFITQLLPVKRKLGFYEATSRLRSHINPTGTVLLQLENTMQTSLKDLL

SEQ ID NO: 987 - DNA, 1194 bp, Artificial Sequence
  variant of human alpha-galactosidase A
ctggataatggattggctagaacacctcctatggggtggcttcactgggagaggttcatgtgcaacctggactgtcaggaagaaccagacagctgcatctccgagaagctctttgaggaaatggccgaacgaatggtgactgacggctggaaagatgcaggttacgagtatctgtgtattgacgattgctggatggccccacaacgggattctgagggaagacttcaggctgatccgcagcgcttccctcatggcataaggcagctggcaaaccacgtccacagtaaggggctcaaattgggaatctacgcggacgtgggcaataagacctgtgccggttttccgggatcattcgggtattatgacattgacgcccaaacgtttgctgattggggcgttgacctgctgaaattcgatggttgctactgtgacagcctcgaaaacctggcagacggctacaagcatatgtctctcgccctgaataaaaccggtcggccaatcgtatattcctgcgagtggcctctttacatgtggccatttcagaaaccgaactacacagaaattcgccagtattgcaatcattggaggaacttcgctgatatcgatgactcatgggcctccataaagagcatcttggactggaccagtcggaatcaggagcgaattgtggatgtcgcaggccctggaggatggaacgatccagacatgctggtgatcggcaattttggcctctcttgggaccagcaggttacccaaatggctctgtgggcaattatggccggtcctcttttcatgagcaacgatctgcgcgcgatctcaccacaggcaaaggccctgctccaagacaaagatgtgatagccatcaatcaggacccgttgggaaagcagggctaccagctgagaaaaggcgacaactttgaggtctgggaaaggcctttgagtggagatgcgtgggctgtggccattattaatgcgcaagagatcggaggtccacgcggttatacaattcctgtagcatctcttggcaagggcgttgcctgtaacccagcttgcttcatcactcagcttctgccggtgaagagaaaactgggtttctacgaagctaccagcaggctccgatcccacatcaaccctacaggaaccgtcctcttgcagctggagaatacgatgcagacttcactgaaggacctcctg

SEQ ID NO: 988 - protein, 398 aa, Artificial Sequence
  variant of human alpha-galactosidase A
LDNGLARTPPMGWLHWERFMCNLDCQEEPDSCISEKLFEEMAERMVTDGWKDAGYEYLCIDDCWMAPQRDSEGRLQADPQRFPHGIRQLANHVHSKGLKLGIYADVGNKTCAGFPGSFGYYDIDAQTFADWGVDLLKFDGCYCDSLENLADGYKHMSLALNKTGRPIVYSCEWPLYMWPFQKPNYTEIRQYCNHWRNFADIDDSWASIKSILDWTSRNQERIVDVAGPGGWNDPDMLVIGNFGLSWDQQVTQMALWAIMAGPLFMSNDLRAISPQAKALLQDKDVIAINQDPLGKQGYQLRKGDNFEVWERPLSGDAWAVAIINAQEIGGPRGYTIPVASLGKGVACNPACFITQLLPVKRKLGFYEATSRLRSHINPTGTVLLQLENTMQTSLKDLL

SEQ ID NO: 989 - DNA, 1194 bp, Artificial Sequence
  variant of human alpha-galactosidase A
ctggataatggattggctagaacacctcctatggggtggcttcactgggagaggttcatgtgcaacctggactgtcaggaagaaccagacagctgcatctccgagaagctctttgaggaaatggccgaacgaatggtgactgacggctggaaagatgcaggttacgagtatctgtgtattgacgattgctggatggccccacaacgggattctgagggaagacttcaggctgatccgcagcgcttccctcatggcataaggcagctggcaaaccacgtccacagtaaggggctcaaattgggaatctacgcggacgtgggcaataagacctgtgccggttttccgggatcattcgggtattatgacattgacgcccaaacgtttgctgattggggcgttgacctgctgaaattcgatggttgctactgtgacagcctcgaaaacctggcagacggctacaagcatatgtctctcgccctgaataaaaccggtcggccaatcgtatattcctgcgagtggcctctttacatgtggccatttcagaaaccgaactacacagaaattcgccagtattgcaatcattggaggaacttcgctgatatcgatgactcatgggcctccataaagagcatcttggactggaccagtcggaatcaggagcgaattgtggatgtcgcaggccctggaggatggaacgatccagacatgctggtgatcggcaattttggcctctcttgggaccagcaggttacccaaatggctctgtgggcaattatggccggtcctcttttcatgagcaacgatctgcgcgcgatctcaccacaggcaaaggccctgctccaagacaaagatgtgatagccatcaatcaggacccgttgggaaagcagggctaccagctgagaaaaggcgacaactttgaggtctgggaaaggcctttgagtggagatgcgtgggctgtggccattattaatcggcaagagatcggaggtccagggggttatacaattcctgtagcatctcttggcaagggcgttgcctgtaacccagcttgcttcatcactcagcttctgccggtgaagagaaaactgggtttctacgaagctaccagcaggctccgatcccacatcaaccctacaggaaccgtcctcttgcagctggagaatacgatgcagacttcactgaaggacctcctg

SEQ ID NO: 990 - protein, 398 aa, Artificial Sequence
  variant of human alpha-galactosidase A
LDNGLARTPPMGWLHWERFMCNLDCQEEPDSCISEKLFEEMAERMVTDGWKDAGYEYLCIDDCWMAPQRDSEGRLQADPQRFPHGIRQLANHVHSKGLKLGIYADVGNKTCAGFPGSFGYYDIDAQTFADWGVDLLKFDGCYCDSLENLADGYKHMSLALNKTGRPIVYSCEWPLYMWPFQKPNYTEIRQYCNHWRNFADIDDSWASIKSILDWTSRNQERIVDVAGPGGWNDPDMLVIGNFGLSWDQQVTQMALWAIMAGPLFMSNDLRAISPQAKALLQDKDVIAINQDPLGKQGYQLRKGDNFEVWERPLSGDAWAVAIINRQEIGGPGGYTIPVASLGKGVACNPACFITQLLPVKRKLGFYEATSRLRSHINPTGTVLLQLENTMQTSLKDLL

SEQ ID NO: 991 - DNA, 1194 bp, Artificial Sequence
  variant of human alpha-galactosidase A
ctggataatggattggctagaacacctcctatggggtggcttcactgggagaggttcatgtgcaacctggactgtcaggaagaaccagacagctgcatctccgagaagctctttgaggaaatggccgaacgaatggtgactgacggctggaaagatgcaggttacgagtatctgtgtattgacgattgctggatggccccacaacgggattctgagggaagacttcaggctgatccgcagcgcttccctcatggcataaggcagctggcaaaccacgtccacagtaaggggctcaaattgggaatctacgcggacgtgggcaataagacctgtgccggttttccgggatcattcgggtattatgacattgacgcccaaacgtttgctgattggggcgttgacctgctgaaattcgatggttgctactgtgacagcctcgaaaacctggcagacggctacaagcatatgtctctcgccctgaataaaaccggtcggccaatcgtatattcctgcgagtggcctctttacatgtggccatttcagaaaccgaactacacagaaattcgccagtattgcaatcattggaggaacttcgctgatatcgatgactcatgggcctccataaagagcatcttggactggaccagtcggaatcaggagcgaattgtggatgtcgcaggccctggaggatggaacgatccagacatgctggtgatcggcaattttggcctctcttgggaccagcaggttacccaaatggctctgtgggcaattatggccggtcctcttttcatgagcaacgatctgcgcgcgatctcaccacaggcaaaggccctgctccaagacaaagatgtgatagccatcaatcaggacccgttgggaaagcagggctaccagctgagaaaaggcgacaactttgaggtctgggaaaggcctttgagtggagatgcgtgggctgtggccattattaatcggcaagagatcggaggtccacatggttatacaattcctgtagcatctcttggcaagggcgttgcctgtaacccagcttgcttcatcactcagcttctgccggtgaagagaaaactgggtttctacgaagctaccagcaggctccgatcccacatcaaccctacaggaaccgtcctcttgcagctggagaatacgatgcagacttcactgaaggacctcctg

SEQ ID NO: 992 - protein, 398 aa, Artificial Sequence
  variant of human alpha-galactosidase A
LDNGLARTPPMGWLHWERFMCNLDCQEEPDSCISEKLFEEMAERMVTDGWKDAGYEYLCIDDCWMAPQRDSEGRLQADPQRFPHGIRQLANHVHSKGLKLGIYADVGNKTCAGFPGSFGYYDIDAQTFADWGVDLLKFDGCYCDSLENLADGYKHMSLALNKTGRPIVYSCEWPLYMWPFQKPNYTEIRQYCNHWRNFADIDDSWASIKSILDWTSRNQERIVDVAGPGGWNDPDMLVIGNFGLSWDQQVTQMALWAIMAGPLFMSNDLRAISPQAKALLQDKDVIAINQDPLGKQGYQLRKGDNFEVWERPLSGDAWAVAIINRQEIGGPHGYTIPVASLGKGVACNPACFITQLLPVKRKLGFYEATSRLRSHINPTGTVLLQLENTMQTSLKDLL

SEQ ID NO: 993 - DNA, 1194 bp, Artificial Sequence
  variant of human alpha-galactosidase A
ctggataatggattggctagaacacctcctatggggtggcttcactgggagaggttcatgtgcaacctggactgtcaggaagaaccagacagctgcatctccgagaagctctttgaggaaatggccgaacgaatggtgactgacggctggaaagatgcaggttacgagtatctgtgtattgacgattgctggatggccccacaacgggattctgagggaagacttcaggctgatccgcagcgcttccctcatggcataaggcagctggcaaaccacgtccacagtaaggggctcaaattgggaatctacgcggacgtgggcaataagacctgtgccggttttccgggatcattcgggtattatgacattgacgcccaaacgtttgctgattggggcgttgacctgctgaaattcgatggttgctactgtgacagcctcgaaaacctggcagacggctacaagcatatgtctctcgccctgaataaaaccggtcggccaatcgtatattcctgcgagtggcctctttacatgtggccatttcagaaaccgaactacacagaaattcgccagtattgcaatcattggaggaacttcgctgatatcgatgactcatgggcctccataaagagcatcttggactggaccagtcggaatcaggagcgaattgtggatgtcgcaggccctggaggatggaacgatccagacatgctggtgatcggcaattttggcctctcttgggaccagcaggttacccaaatggctctgtgggcaattatggccggtcctcttttcatgagcaacgatctgcgcgcgatctcaccacaggcaaaggccctgctccaagacaaagatgtgatagccatcaatcaggacccgttgggaaagcagggctaccagctgagaaaaggcgacaactttgaggtctgggaaaggcctttgagtggagatgcgtgggctgtggccattattaatcggcaagagatcggaggtccacgcggttatacaattcctgtagcatctcttggcaagggcgttgcctgtaacccagcttgcttcatcactcagcttctgccggtgaagaccaaactgggtttctacgaagctaccagcaggctccgatcccacatcaaccctacaggaaccgtcctcttgcagctggagaatacgatgcagacttcactgaaggacctcctg

SEQ ID NO: 994 - protein, 398 aa, Artificial Sequence
  variant of human alpha-galactosidase A
LDNGLARTPPMGWLHWERFMCNLDCQEEPDSCISEKLFEEMAERMVTDGWKDAGYEYLCIDDCWMAPQRDSEGRLQADPQRFPHGIRQLANHVHSKGLKLGIYADVGNKTCAGFPGSFGYYDIDAQTFADWGVDLLKFDGCYCDSLENLADGYKHMSLALNKTGRPIVYSCEWPLYMWPFQKPNYTEIRQYCNHWRNFADIDDSWASIKSILDWTSRNQERIVDVAGPGGWNDPDMLVIGNFGLSWDQQVTQMALWAIMAGPLFMSNDLRAISPQAKALLQDKDVIAINQDPLGKQGYQLRKGDNFEVWERPLSGDAWAVAIINRQEIGGPRGYTIPVASLGKGVACNPACFITQLLPVKTKLGFYEATSRLRSHINPTGTVLLQLENTMQTSLKDLL

SEQ ID NO: 995 - DNA, 1194 bp, Artificial Sequence
  variant of human alpha-galactosidase A
ctggataatggattggctagaacacctcctatggggtggcttcactgggagaggttcatgtgcaacctggactgtcaggaagaaccagacagctgcatctccgagaagctctttgaggaaatggccgaacgaatggtgactgacggctggaaagatgcaggttacgagtatctgtgtattgacgattgctggatggccccacaacgggattctgagggaagacttcaggctgatccgcagcgcttccctcatggcataaggcagctggcaaaccacgtccacagtaaggggctcaaattgggaatctacgcggacgtgggcaataagacctgtgccggttttccgggatcattcgggtattatgacattgacgcccaaacgtttgctgattggggcgttgacctgctgaaattcgatggttgctactgtgacagcctcgaaaacctggcagacggctacaagcatatgtctctcgccctgaataaaaccggtcggccaatcgtatattcctgcgagtggcctctttacatgtggccatttcagaaaccgaactacacagaaattcgccagtattgcaatcattggaggaacttcgctgatatcgatgactcatgggcctccataaagagcatcttggactggaccagtcggaatcaggagcgaattgtggatgtcgcaggccctggaggatggaacgatccagacatgctggtgatcggcaattttggcctctcttgggaccagcaggttacccaaatggctctgtgggcaattatggccggtcctcttttcatgagcaacgatctgcgcgcgatctcaccacaggcaaaggccctgctccaagacaaagatgtgatagccatcaatcaggacccgttgggaaagcagggctaccagctgagaaaaggcgacaactttgaggtctgggaaaggcctttgagtggagatgcgtgggctgtggccattattaatcggcaagagatcggaggtccacgcggttatacaattcctgtagcatctcttggcaagggcgttgcctgtaacccagcttgcttcatcactcagcttctgccggtgaaggttaaactgggtttctacgaagctaccagcaggctccgatcccacatcaaccctacaggaaccgtcctcttgcagctggagaatacgatgcagacttcactgaaggacctcctg

SEQ ID NO: 996 - protein, 398 aa, Artificial Sequence
  variant of human alpha-galactosidase A
LDNGLARTPPMGWLHWERFMCNLDCQEEPDSCISEKLFEEMAERMVTDGWKDAGYEYLCIDDCWMAPQRDSEGRLQADPQRFPHGIRQLANHVHSKGLKLGIYADVGNKTCAGFPGSFGYYDIDAQTFADWGVDLLKFDGCYCDSLENLADGYKHMSLALNKTGRPIVYSCEWPLYMWPFQKPNYTEIRQYCNHWRNFADIDDSWASIKSILDWTSRNQERIVDVAGPGGWNDPDMLVIGNFGLSWDQQVTQMALWAIMAGPLFMSNDLRAISPQAKALLQDKDVIAINQDPLGKQGYQLRKGDNFEVWERPLSGDAWAVAIINRQEIGGPRGYTIPVASLGKGVACNPACFITQLLPVKVKLGFYEATSRLRSHINPTGTVLLQLENTMQTSLKDLL

SEQ ID NO: 997 - DNA, 1194 bp, Artificial Sequence
  variant of human alpha-galactosidase A
ctggataatggattggctagaacacctcctatggggtggcttcactgggagaggttcatgtgcaacctggactgtcaggaagaaccagacagctgcatctccgagaagctctttgaggaaatggccgaacgaatggtgactgacggctggaaagatgcaggttacgagtatctgtgtattgacgattgctggatggccccacaacgggattctgagggaagacttcaggctgatccgcagcgcttccctcatggcataaggcagctggcaaaccacgtccacagtaaggggctcaaattgggaatctacgcggacgtgggcaataagacctgtgccggttttccgggatcattcgggtattatgacattgacgcccaaacgtttgctgattggggcgttgacctgctgaaattcgatggttgctactgtgacagcctcgaaaacctggcagacggctacaagcatatgtctctcgccctgaataaaaccggtcggccaatcgtatattcctgcgagtggcctctttacatgtggccatttcagaaaccgaactacacagaaattcgccagtattgcaatcattggaggaacttcgctgatatcgatgactcatgggcctccataaagagcatcttggactggaccagtcggaatcaggagcgaattgtggatgtcgcaggccctggaggatggaacgatccagacatgctggtgatcggcaattttggcctctcttgggaccagcaggttacccaaatggctctgtgggcaattatggccggtcctcttttcatgagcaacgatctgcgcgcgatctcaccacaggcaaaggccctgctccaagacaaagatgtgatagccatcaatcaggacccgttgggaaagcagggctaccagctgagaaaaggcgacaactttgaggtctgggaaaggcctttgagtggagatgcgtgggctgtggccattattaatcggcaagagatcggaggtccacgcggttatacaattcctgtagcatctcttggcaagggcgttgcctgtaacccagcttgcttcatcactcagcttctgccggtgaagagaaaactgggtttctacgaagctaccagcgggctccgatcccacatcaaccctacaggaaccgtcctcttgcagctggagaatacgatgcagacttcactgaaggacctcctg

SEQ ID NO: 998 - protein, 398 aa, Artificial Sequence
  variant of human alpha-galactosidase A
LDNGLARTPPMGWLHWERFMCNLDCQEEPDSCISEKLFEEMAERMVTDGWKDAGYEYLCIDDCWMAPQRDSEGRLQADPQRFPHGIRQLANHVHSKGLKLGIYADVGNKTCAGFPGSFGYYDIDAQTFADWGVDLLKFDGCYCDSLENLADGYKHMSLALNKTGRPIVYSCEWPLYMWPFQKPNYTEIRQYCNHWRNFADIDDSWASIKSILDWTSRNQERIVDVAGPGGWNDPDMLVIGNFGLSWDQQVTQMALWAIMAGPLFMSNDLRAISPQAKALLQDKDVIAINQDPLGKQGYQLRKGDNFEVWERPLSGDAWAVAIINRQEIGGPRGYTIPVASLGKGVACNPACFITQLLPVKRKLGFYEATSGLRSHINPTGTVLLQLENTMQTSLKDLL

SEQ ID NO: 999 - DNA, 1194 bp, Artificial Sequence
  variant of human alpha-galactosidase A
ctggataatggattggctagaacacctcctatggggtggcttcactgggagaggttcatgtgcaacctggactgtcaggaagaaccagacagctgcatctccgagaagctctttgaggaaatggccgaacgaatggtgactgacggctggaaagatgcaggttacgagtatctgtgtattgacgattgctggatggccccacaacgggattctgagggaagacttcaggctgatccgcagcgcttccctcatggcataaggcagctggcaaaccacgtccacagtaaggggctcaaattgggaatctacgcggacgtgggcaataagacctgtgccggttttccgggatcattcgggtattatgacattgacgcccaaacgtttgctgattggggcgttgacctgctgaaattcgatggttgctactgtgacagcctcgaaaacctggcagacggctacaagcatatgtctctcgccctgaataaaaccggtcggccaatcgtatattcctgcgagtggcctctttacatgtggccatttcagaaaccgaactacacagaaattcgccagtattgcaatcattggaggaacttcgctgatatcgatgactcatgggcctccataaagagcatcttggactggaccagtcggaatcaggagcgaattgtggatgtcgcaggccctggaggatggaacgatccagacatgctggtgatcggcaattttggcctctcttgggaccagcaggttacccaaatggctctgtgggcaattatggccggtcctcttttcatgagcaacgatctgcgcgcgatctcaccacaggcaaaggccctgctccaagacaaagatgtgatagccatcaatcaggacccgttgggaaagcagggctaccagctgagaaaaggcgacaactttgaggtctgggaaaggcctttgagtggagatgcgtgggctgtggccattattaatcggcaagagatcggaggtccacgcggttatacaattcctgtagcatctcttggcaagggcgttgcctgtaacccagcttgcttcatcactcagcttctgccggtgaagagaaaactgggtttctacgaagctaccagcaggctcttgtcccacatcaaccctacaggaaccgtcctcttgcagctggagaatacgatgcagacttcactgaaggacctcctg

SEQ ID NO: 1000 - protein, 398 aa, Artificial Sequence
  variant of human alpha-galactosidase A
LDNGLARTPPMGWLHWERFMCNLDCQEEPDSCISEKLFEEMAERMVTDGWKDAGYEYLCIDDCWMAPQRDSEGRLQADPQRFPHGIRQLANHVHSKGLKLGIYADVGNKTCAGFPGSFGYYDIDAQTFADWGVDLLKFDGCYCDSLENLADGYKHMSLALNKTGRPIVYSCEWPLYMWPFQKPNYTEIRQYCNHWRNFADIDDSWASIKSILDWTSRNQERIVDVAGPGGWNDPDMLVIGNFGLSWDQQVTQMALWAIMAGPLFMSNDLRAISPQAKALLQDKDVIAINQDPLGKQGYQLRKGDNFEVWERPLSGDAWAVAIINRQEIGGPRGYTIPVASLGKGVACNPACFITQLLPVKRKLGFYEATSRLLSHINPTGTVLLQLENTMQTSLKDLL

SEQ ID NO: 1001 - DNA, 1194 bp, Artificial Sequence
  variant of human alpha-galactosidase A
ctggataatggattggctagaacacctcctatggggtggcttcactgggagaggttcatgtgcaacctggactgtcaggaagaaccagacagctgcatctccgagaagctctttgaggaaatggccgaacgaatggtgactgacggctggaaagatgcaggttacgagtatctgtgtattgacgattgctggatggccccacaacgggattctgagggaagacttcaggctgatccgcagcgcttccctcatggcataaggcagctggcaaaccacgtccacagtaaggggctcaaattgggaatctacgcggacgtgggcaataagacctgtgccggttttccgggatcattcgggtattatgacattgacgcccaaacgtttgctgattggggcgttgacctgctgaaattcgatggttgctactgtgacagcctcgaaaacctggcagacggctacaagcatatgtctctcgccctgaataaaaccggtcggccaatcgtatattcctgcgagtggcctctttacatgtggccatttcagaaaccgaactacacagaaattcgccagtattgcaatcattggaggaacttcgctgatatcgatgactcatgggcctccataaagagcatcttggactggaccagtcggaatcaggagcgaattgtggatgtcgcaggccctggaggatggaacgatccagacatgctggtgatcggcaattttggcctctcttgggaccagcaggttacccaaatggctctgtgggcaattatggccggtcctcttttcatgagcaacgatctgcgcgcgatctcaccacaggcaaaggccctgctccaagacaaagatgtgatagccatcaatcaggacccgttgggaaagcagggctaccagctgagaaaaggcgacaactttgaggtctgggaaaggcctttgagtggagatgcgtgggctgtggccattattaatcggcaagagatcggaggtccacgcggttatacaattcctgtagcatctcttggcaagggcgttgcctgtaacccagcttgcttcatcactcagcttctgccggtgaagagaaaactgggtttctacgaagctaccagcaggctctcttcccacatcaaccctacaggaaccgtcctcttgcagctggagaatacgatgcagacttcactgaaggacctcctg

SEQ ID NO: 1002 - protein, 398 aa, Artificial Sequence
  variant of human alpha-galactosidase A
LDNGLARTPPMGWLHWERFMCNLDCQEEPDSCISEKLFEEMAERMVTDGWKDAGYEYLCIDDCWMAPQRDSEGRLQADPQRFPHGIRQLANHVHSKGLKLGIYADVGNKTCAGFPGSFGYYDIDAQTFADWGVDLLKFDGCYCDSLENLADGYKHMSLALNKTGRPIVYSCEWPLYMWPFQKPNYTEIRQYCNHWRNFADIDDSWASIKSILDWTSRNQERIVDVAGPGGWNDPDMLVIGNFGLSWDQQVTQMALWAIMAGPLFMSNDLRAISPQAKALLQDKDVIAINQDPLGKQGYQLRKGDNFEVWERPLSGDAWAVAIINRQEIGGPRGYTIPVASLGKGVACNPACFITQLLPVKRKLGFYEATSRLSSHINPTGTVLLQLENTMQTSLKDLL

SEQ ID NO: 1003 - DNA, 1194 bp, Artificial Sequence
  variant of human alpha-galactosidase A
ctggataatggattggctagaacacctcctatggggtggcttcactgggagaggttcatgtgcaacctggactgtcaggaagaaccagacagctgcatctccgagaagctctttgaggaaatggccgaacgaatggtgactgacggctggaaagatgcaggttacgagtatctgtgtattgacgattgctggatggccccacaacgggattctgagggaagacttcaggctgatccgcagcgcttccctcatggcataaggcagctggcaaaccacgtccacagtaaggggctcaaattgggaatctacgcggacgtgggcaataagacctgtgccggttttccgggatcattcgggtattatgacattgacgcccaaacgtttgctgattggggcgttgacctgctgaaattcgatggttgctactgtgacagcctcgaaaacctggcagacggctacaagcatatgtctctcgccctgaataaaaccggtcggccaatcgtatattcctgcgagtggcctctttacatgtggccatttcagaaaccgaactacacagaaattcgccagtattgcaatcattggaggaacttcgctgatatcgatgactcatgggcctccataaagattatcttggactggaccagtcggaatcaggagcgaattgtggatgtcgcaggccctggaggatggaacgatccagacatgctggtgatcggcaattttggcctctcttgggaccagcaggttacccaaatggctctgtgggcaattatggccggtcctcttttcatgagcaacgatctgcgcgcgatctcaccacaggcaaaggccctgctccaagacaaagatgtgatagccatcaatcaggacccgttgggaaagcagggctaccagctgagaaaaggcgacaactttgaggtctgggaaaggcctttgagtggagatgcgtgggctgtggccattattaatcggcaagagatcggaggtccacgcggttatacaattcctgtagcatctcttggcaagggcgttgcctgtaacccagcttgcttcatcactcagcttctgccggtgaagagaaaactgggtttctacgaagctaccagcaggctccgatcccacatcaaccctacaggaaccgtcctcttgcagctggagaatacgatgcagacttcactgaaggacctcctg

SEQ ID NO: 1004 - protein, 398 aa, Artificial Sequence
  variant of human alpha-galactosidase A
LDNGLARTPPMGWLHWERFMCNLDCQEEPDSCISEKLFEEMAERMVTDGWKDAGYEYLCIDDCWMAPQRDSEGRLQADPQRFPHGIRQLANHVHSKGLKLGIYADVGNKTCAGFPGSFGYYDIDAQTFADWGVDLLKFDGCYCDSLENLADGYKHMSLALNKTGRPIVYSCEWPLYMWPFQKPNYTEIRQYCNHWRNFADIDDSWASIKIILDWTSRNQERIVDVAGPGGWNDPDMLVIGNFGLSWDQQVTQMALWAIMAGPLFMSNDLRAISPQAKALLQDKDVIAINQDPLGKQGYQLRKGDNFEVWERPLSGDAWAVAIINRQEIGGPRGYTIPVASLGKGVACNPACFITQLLPVKRKLGFYEATSRLRSHINPTGTVLLQLENTMQTSLKDLL

SEQ ID NO: 1005 - DNA, 1194 bp, Artificial Sequence
  variant of human alpha-galactosidase A
ctggataatggattggctagaacacctcctatggggtggcttcactgggagaggttcatgtgcaacctggactgtcaggaagaaccagacagctgcatctccgagaagctctttgaggaaatggccgaacgaatggtgactgacggctggaaagatgcaggttacgagtatctgtgtattgacgattgctggatggccccacaacgggattctgagggaagacttcaggctgatccgcagcgcttccctcatggcataaggcagctggcaaaccacgtccacagtaaggggctcaaattgggaatctacgcggacgtgggcaataagacctgtgccggttttccgggatcattcgggtattatgacattgacgcccaaacgtttgctgattggggcgttgacctgctgaaattcgatggttgctactgtgacagcctcgaaaacctggcagacggctacaagcatatgtctctcgccctgaataaaaccggtcggccaatcgtatattcctgcgagtggcctctttacatgtggccatttcagaaaccgaactacacagaaattcgccagtattgcaatcattggaggaacttcgctgatatcgatgactcatgggcctccataaagagcatcttggactggaccagtcggaatcaggagcgaattgtggatgtcgcaggccctggaggatggaacgatccagacatgctggtgatcggcaattttggcctctcttgggaccagcaggttacccaaatggctctgtgggcaattatggccggtcctcttttcatgagcaacgatctgcgcgcgatccttccacaggcaaaggccctgctccaagacaaagatgtgatagccatcaatcaggacccgttgggaaagcagggctaccagctgagaaaaggcgacaactttgaggtctgggaaaggcctttgagtggagatgcgtgggctgtggccattattaatcggcaagagatcggaggtccacgcggttatacaattcctgtagcatctcttggcaagggcgttgcctgtaacccagcttgcttcatcactcagcttctgccggtgaagagaaaactgggtttctacgaagctaccagcaggctccgatcccacatcaaccctacaggaaccgtcctcttgcagctggagaatacgatgcagacttcactgaaggacctcctg

SEQ ID NO: 1006 - protein, 398 aa, Artificial Sequence
  variant of human alpha-galactosidase A
LDNGLARTPPMGWLHWERFMCNLDCQEEPDSCISEKLFEEMAERMVTDGWKDAGYEYLCIDDCWMAPQRDSEGRLQADPQRFPHGIRQLANHVHSKGLKLGIYADVGNKTCAGFPGSFGYYDIDAQTFADWGVDLLKFDGCYCDSLENLADGYKHMSLALNKTGRPIVYSCEWPLYMWPFQKPNYTEIRQYCNHWRNFADIDDSWASIKSILDWTSRNQERIVDVAGPGGWNDPDMLVIGNFGLSWDQQVTQMALWAIMAGPLFMSNDLRAILPQAKALLQDKDVIAINQDPLGKQGYQLRKGDNFEVWERPLSGDAWAVAIINRQEIGGPRGYTIPVASLGKGVACNPACFITQLLPVKRKLGFYEATSRLRSHINPTGTVLLQLENTMQTSLKDLL

SEQ ID NO: 1007 - DNA, 1194 bp, Artificial Sequence
  variant of human alpha-galactosidase A
ctggataatggattggctagaacacctcctatggggtggcttcactgggagaggttcatgtgcaacctggactgtcaggaagaaccagacttttgcatctccgagaagctctttgaggaaatggccgaacgaatggtgactgacggctggaaagatgcaggttacgagtatctgtgtattgacgattgctggatggccccacaacgggattctgagggaagacttcaggctgatccgcagcgcttccctcatggcataaggcagctggcaaaccacgtccacagtaaggggctcaaattgggaatctacgcggacgtgggcaataagacctgtgccggttttccgggatcattcgggtattatgacattgacgcccaaacgtttgctgattggggcgttgacctgctgaaattcgatggttgctactgtgacagcctcgaaaacctggcagacggctacaagcatatgtctctcgccctgaataaaaccggtcggccaatcgtatattcctgcgagtggcctctttacatgtggccatttcagaaaccgaactacacagaaattcgccagtattgcaatcattggaggaacttcgctgatatcgatgactcatgggcctccataaagagcatcttggactggaccagtcggaatcaggagcgaattgtggatgtcgcaggccctggaggatggaacgatccagacatgctggtgatcggcaattttggcctctcttgggaccagcaggttacccaaatggctctgtgggcaattatggccggtcctcttttcatgagcaacgatctgcgcgcgatctcaccacaggcaaaggccctgctccaagacaaagatgtgatagccatcaatcaggacccgttgggaaagcagggctaccagctgagaaaaggcgacaactttgaggtctgggaaaggcctttgagtggagatgcgtgggctgtggccattattaatcggcaagagatcggaggtccacgcggttatacaattcctgtagcatctcttggcaagggcgttgcctgtaacccagcttgcttcatcactcagcttctgccggtgaagagaaaactgggtttctacgaagctaccagcaggctccgatcccacatcaaccctacaggaaccgtcctcttgcagctggagaatacgatgcagacttcactgaaggacctcctg

SEQ ID NO: 1008 - protein, 398 aa, Artificial Sequence
  variant of human alpha-galactosidase A
LDNGLARTPPMGWLHWERFMCNLDCQEEPDFCISEKLFEEMAERMVTDGWKDAGYEYLCIDDCWMAPQRDSEGRLQADPQRFPHGIRQLANHVHSKGLKLGIYADVGNKTCAGFPGSFGYYDIDAQTFADWGVDLLKFDGCYCDSLENLADGYKHMSLALNKTGRPIVYSCEWPLYMWPFQKPNYTEIRQYCNHWRNFADIDDSWASIKSILDWTSRNQERIVDVAGPGGWNDPDMLVIGNFGLSWDQQVTQMALWAIMAGPLFMSNDLRAISPQAKALLQDKDVIAINQDPLGKQGYQLRKGDNFEVWERPLSGDAWAVAIINRQEIGGPRGYTIPVASLGKGVACNPACFITQLLPVKRKLGFYEATSRLRSHINPTGTVLLQLENTMQTSLKDLL

SEQ ID NO: 1009 - DNA, 1194 bp, Artificial Sequence
  variant of human alpha-galactosidase A
ctggataatggattggctagaacacctcctatggggtggcttcactgggagaggttcatgtgcaacctggactgtcaggaagaaccagaccattgcatctccgagaagctctttgaggaaatggccgaacgaatggtgactgacggctggaaagatgcaggttacgagtatctgtgtattgacgattgctggatggccccacaacgggattctgagggaagacttcaggctgatccgcagcgcttccctcatggcataaggcagctggcaaaccacgtccacagtaaggggctcaaattgggaatctacgcggacgtgggcaataagacctgtgccggttttccgggatcattcgggtattatgacattgacgcccaaacgtttgctgattggggcgttgacctgctgaaattcgatggttgctactgtgacagcctcgaaaacctggcagacggctacaagcatatgtctctcgccctgaataaaaccggtcggccaatcgtatattcctgcgagtggcctctttacatgtggccatttcagaaaccgaactacacagaaattcgccagtattgcaatcattggaggaacttcgctgatatcgatgactcatgggcctccataaagagcatcttggactggaccagtcggaatcaggagcgaattgtggatgtcgcaggccctggaggatggaacgatccagacatgctggtgatcggcaattttggcctctcttgggaccagcaggttacccaaatggctctgtgggcaattatggccggtcctcttttcatgagcaacgatctgcgcgcgatctcaccacaggcaaaggccctgctccaagacaaagatgtgatagccatcaatcaggacccgttgggaaagcagggctaccagctgagaaaaggcgacaactttgaggtctgggaaaggcctttgagtggagatgcgtgggctgtggccattattaatcggcaagagatcggaggtccacgcggttatacaattcctgtagcatctcttggcaagggcgttgcctgtaacccagcttgcttcatcactcagcttctgccggtgaagagaaaactgggtttctacgaagctaccagcaggctccgatcccacatcaaccctacaggaaccgtcctcttgcagctggagaatacgatgcagacttcactgaaggacctcctg

SEQ ID NO: 1010 - protein, 398 aa, Artificial Sequence
  variant of human alpha-galactosidase A
LDNGLARTPPMGWLHWERFMCNLDCQEEPDHCISEKLFEEMAERMVTDGWKDAGYEYLCIDDCWMAPQRDSEGRLQADPQRFPHGIRQLANHVHSKGLKLGIYADVGNKTCAGFPGSFGYYDIDAQTFADWGVDLLKFDGCYCDSLENLADGYKHMSLALNKTGRPIVYSCEWPLYMWPFQKPNYTEIRQYCNHWRNFADIDDSWASIKSILDWTSRNQERIVDVAGPGGWNDPDMLVIGNFGLSWDQQVTQMALWAIMAGPLFMSNDLRAISPQAKALLQDKDVIAINQDPLGKQGYQLRKGDNFEVWERPLSGDAWAVAIINRQEIGGPRGYTIPVASLGKGVACNPACFITQLLPVKRKLGFYEATSRLRSHINPTGTVLLQLENTMQTSLKDLL

SEQ ID NO: 1011 - DNA, 1194 bp, Artificial Sequence
  variant of human alpha-galactosidase A
ctggataatggattggctagaacacctcctatggggtggcttcactgggagaggttcatgtgcaacctggactgtcaggaagaaccagacctgtgcatctccgagaagctctttgaggaaatggccgaacgaatggtgactgacggctggaaagatgcaggttacgagtatctgtgtattgacgattgctggatggccccacaacgggattctgagggaagacttcaggctgatccgcagcgcttccctcatggcataaggcagctggcaaaccacgtccacagtaaggggctcaaattgggaatctacgcggacgtgggcaataagacctgtgccggttttccgggatcattcgggtattatgacattgacgcccaaacgtttgctgattggggcgttgacctgctgaaattcgatggttgctactgtgacagcctcgaaaacctggcagacggctacaagcatatgtctctcgccctgaataaaaccggtcggccaatcgtatattcctgcgagtggcctctttacatgtggccatttcagaaaccgaactacacagaaattcgccagtattgcaatcattggaggaacttcgctgatatcgatgactcatgggcctccataaagagcatcttggactggaccagtcggaatcaggagcgaattgtggatgtcgcaggccctggaggatggaacgatccagacatgctggtgatcggcaattttggcctctcttgggaccagcaggttacccaaatggctctgtgggcaattatggccggtcctcttttcatgagcaacgatctgcgcgcgatctcaccacaggcaaaggccctgctccaagacaaagatgtgatagccatcaatcaggacccgttgggaaagcagggctaccagctgagaaaaggcgacaactttgaggtctgggaaaggcctttgagtggagatgcgtgggctgtggccattattaatcggcaagagatcggaggtccacgcggttatacaattcctgtagcatctcttggcaagggcgttgcctgtaacccagcttgcttcatcactcagcttctgccggtgaagagaaaactgggtttctacgaagctaccagcaggctccgatcccacatcaaccctacaggaaccgtcctcttgcagctggagaatacgatgcagacttcactgaaggacctcctg

SEQ ID NO: 1012 - protein, 398 aa, Artificial Sequence
  variant of human alpha-galactosidase A
LDNGLARTPPMGWLHWERFMCNLDCQEEPDLCISEKLFEEMAERMVTDGWKDAGYEYLCIDDCWMAPQRDSEGRLQADPQRFPHGIRQLANHVHSKGLKLGIYADVGNKTCAGFPGSFGYYDIDAQTFADWGVDLLKFDGCYCDSLENLADGYKHMSLALNKTGRPIVYSCEWPLYMWPFQKPNYTEIRQYCNHWRNFADIDDSWASIKSILDWTSRNQERIVDVAGPGGWNDPDMLVIGNFGLSWDQQVTQMALWAIMAGPLFMSNDLRAISPQAKALLQDKDVIAINQDPLGKQGYQLRKGDNFEVWERPLSGDAWAVAIINRQEIGGPRGYTIPVASLGKGVACNPACFITQLLPVKRKLGFYEATSRLRSHINPTGTVLLQLENTMQTSLKDLL

SEQ ID NO: 1013 - DNA, 1194 bp, Artificial Sequence
  variant of human alpha-galactosidase A
ctggataatggattggctagaacacctcctatggggtggcttcactgggagaggttcatgtgcaacctggactgtcaggaagaaccagacacgtgcatctccgagaagctctttgaggaaatggccgaacgaatggtgactgacggctggaaagatgcaggttacgagtatctgtgtattgacgattgctggatggccccacaacgggattctgagggaagacttcaggctgatccgcagcgcttccctcatggcataaggcagctggcaaaccacgtccacagtaaggggctcaaattgggaatctacgcggacgtgggcaataagacctgtgccggttttccgggatcattcgggtattatgacattgacgcccaaacgtttgctgattggggcgttgacctgctgaaattcgatggttgctactgtgacagcctcgaaaacctggcagacggctacaagcatatgtctctcgccctgaataaaaccggtcggccaatcgtatattcctgcgagtggcctctttacatgtggccatttcagaaaccgaactacacagaaattcgccagtattgcaatcattggaggaacttcgctgatatcgatgactcatgggcctccataaagagcatcttggactggaccagtcggaatcaggagcgaattgtggatgtcgcaggccctggaggatggaacgatccagacatgctggtgatcggcaattttggcctctcttgggaccagcaggttacccaaatggctctgtgggcaattatggccggtcctcttttcatgagcaacgatctgcgcgcgatctcaccacaggcaaaggccctgctccaagacaaagatgtgatagccatcaatcaggacccgttgggaaagcagggctaccagctgagaaaaggcgacaactttgaggtctgggaaaggcctttgagtggagatgcgtgggctgtggccattattaatcggcaagagatcggaggtccacgcggttatacaattcctgtagcatctcttggcaagggcgttgcctgtaacccagcttgcttcatcactcagcttctgccggtgaagagaaaactgggtttctacgaagctaccagcaggctccgatcccacatcaaccctacaggaaccgtcctcttgcagctggagaatacgatgcagacttcactgaaggacctcctg

SEQ ID NO: 1014 - protein, 398 aa, Artificial Sequence
  variant of human alpha-galactosidase A
LDNGLARTPPMGWLHWERFMCNLDCQEEPDTCISEKLFEEMAERMVTDGWKDAGYEYLCIDDCWMAPQRDSEGRLQADPQRFPHGIRQLANHVHSKGLKLGIYADVGNKTCAGFPGSFGYYDIDAQTFADWGVDLLKFDGCYCDSLENLADGYKHMSLALNKTGRPIVYSCEWPLYMWPFQKPNYTEIRQYCNHWRNFADIDDSWASIKSILDWTSRNQERIVDVAGPGGWNDPDMLVIGNFGLSWDQQVTQMALWAIMAGPLFMSNDLRAISPQAKALLQDKDVIAINQDPLGKQGYQLRKGDNFEVWERPLSGDAWAVAIINRQEIGGPRGYTIPVASLGKGVACNPACFITQLLPVKRKLGFYEATSRLRSHINPTGTVLLQLENTMQTSLKDLL

SEQ ID NO: 1015 - DNA, 1194 bp, Artificial Sequence
  variant of human alpha-galactosidase A
ctggataatggattggctagaacacctcctatggggtggcttcactgggagaggttcatgtgcaacctggactgtcaggaagaaccagactggtgcatctccgagaagctctttgaggaaatggccgaacgaatggtgactgacggctggaaagatgcaggttacgagtatctgtgtattgacgattgctggatggccccacaacgggattctgagggaagacttcaggctgatccgcagcgcttccctcatggcataaggcagctggcaaaccacgtccacagtaaggggctcaaattgggaatctacgcggacgtgggcaataagacctgtgccggttttccgggatcattcgggtattatgacattgacgcccaaacgtttgctgattggggcgttgacctgctgaaattcgatggttgctactgtgacagcctcgaaaacctggcagacggctacaagcatatgtctctcgccctgaataaaaccggtcggccaatcgtatattcctgcgagtggcctctttacatgtggccatttcagaaaccgaactacacagaaattcgccagtattgcaatcattggaggaacttcgctgatatcgatgactcatgggcctccataaagagcatcttggactggaccagtcggaatcaggagcgaattgtggatgtcgcaggccctggaggatggaacgatccagacatgctggtgatcggcaattttggcctctcttgggaccagcaggttacccaaatggctctgtgggcaattatggccggtcctcttttcatgagcaacgatctgcgcgcgatctcaccacaggcaaaggccctgctccaagacaaagatgtgatagccatcaatcaggacccgttgggaaagcagggctaccagctgagaaaaggcgacaactttgaggtctgggaaaggcctttgagtggagatgcgtgggctgtggccattattaatcggcaagagatcggaggtccacgcggttatacaattcctgtagcatctcttggcaagggcgttgcctgtaacccagcttgcttcatcactcagcttctgccggtgaagagaaaactgggtttctacgaagctaccagcaggctccgatcccacatcaaccctacaggaaccgtcctcttgcagctggagaatacgatgcagacttcactgaaggacctcctg

SEQ ID NO: 1016 - protein, 398 aa, Artificial Sequence
  variant of human alpha-galactosidase A
LDNGLARTPPMGWLHWERFMCNLDCQEEPDWCISEKLFEEMAERMVTDGWKDAGYEYLCIDDCWMAPQRDSEGRLQADPQRFPHGIRQLANHVHSKGLKLGIYADVGNKTCAGFPGSFGYYDIDAQTFADWGVDLLKFDGCYCDSLENLADGYKHMSLALNKTGRPIVYSCEWPLYMWPFQKPNYTEIRQYCNHWRNFADIDDSWASIKSILDWTSRNQERIVDVAGPGGWNDPDMLVIGNFGLSWDQQVTQMALWAIMAGPLFMSNDLRAISPQAKALLQDKDVIAINQDPLGKQGYQLRKGDNFEVWERPLSGDAWAVAIINRQEIGGPRGYTIPVASLGKGVACNPACFITQLLPVKRKLGFYEATSRLRSHINPTGTVLLQLENTMQTSLKDLL

SEQ ID NO: 1017 - DNA, 1194 bp, Artificial Sequence
  variant of human alpha-galactosidase A
ctggataatggattggctagaacacctcctatggggtggcttcactgggagaggttcatgtgcaacctggactgtcaggaagaaccagacagctgcatctccgagaagctctttgaggaaatggccgaacgaatggtgactgacggctggaaagatgcaggttacgagtatctgtgtattgacgattgctggatggccccacaacgggattctgagggaagacttcaggctgatccgcagcgcttccctcatggcataaggcagctggcaaaccacgtccacagtaaggggctcaaattgggaatctacgcggacgtgggcaataagacctgtgccggttttccgggatcattcgggtattatgacattgacgcccaaacgtttgctgattggggcgttgacctgctgaaattcgatggttgctactgtgacagcctcgaaaacctggcagacggctacaagcatatgtctctcgccctgaataaaaccggtcggccaatcgtatattcctgcgagtggcctctttacatgtggccatttcagaaaccgaactacacagaaattcgccagtattgcaatcattggaggaacttcgctgatatcgatgactcatgggcctccataaagagcatcttggactggaccagtcggaatcaggagcgaattgtggatgtcgcaggccctggaggatggaacgatccagacatgctggtgatcggcaattttggcctctcttgggaccagcaggttacccaaatggctctgtgggcaattatggccggtcctcttttcatgagcaacgatctgcgcgcgatctcaccacaggcaaaggccctgctccaagacaaagatgtgatagccatcaatcaggacccgttgggaaagcagggctaccagctgagaaaaggcgacaactttgaggtctgggaaaggcctttgagtggagatgcgtgggctgtggccattattaatcggcaagagatcggaggtccacgcggttatacaattcctgtagcacatcttggcaagggcgttgcctgtaacccagcttgcttcatcactcagcttctgccggtgaagagaaaactgggtttctacgaagctaccagcaggctccgatcccacatcaaccctacaggaaccgtcctcttgcagctggagaatacgatgcagacttcactgaaggacctcctg

SEQ ID NO: 1018 - protein, 398 aa, Artificial Sequence
  variant of human alpha-galactosidase A
LDNGLARTPPMGWLHWERFMCNLDCQEEPDSCISEKLFEEMAERMVTDGWKDAGYEYLCIDDCWMAPQRDSEGRLQADPQRFPHGIRQLANHVHSKGLKLGIYADVGNKTCAGFPGSFGYYDIDAQTFADWGVDLLKFDGCYCDSLENLADGYKHMSLALNKTGRPIVYSCEWPLYMWPFQKPNYTEIRQYCNHWRNFADIDDSWASIKSILDWTSRNQERIVDVAGPGGWNDPDMLVIGNFGLSWDQQVTQMALWAIMAGPLFMSNDLRAISPQAKALLQDKDVIAINQDPLGKQGYQLRKGDNFEVWERPLSGDAWAVAIINRQEIGGPRGYTIPVAHLGKGVACNPACFITQLLPVKRKLGFYEATSRLRSHINPTGTVLLQLENTMQTSLKDLL

SEQ ID NO: 1019 - DNA, 1194 bp, Artificial Sequence
  variant of human alpha-galactosidase A
ctggataatggattggctagaacacctcctatggggtggcttcactgggagaggttcatgtgcaacctggactgtcaggaagaaccagacagctgcatctccgagaagctctttgaggaaatggccgaacgaatggtgactgacggctggaaagatgcaggttacgagtatctgtgtattgacgattgctggatggccccacaacgggattctgagggaagacttcaggctgatccgcagcgcttccctcatggcataaggcagctggcaaaccacgtccacagtaaggggctcaaattgggaatctacgcggacgtgggcaataagacctgtgccggttttccgggatcattcgggtattatgacattgacgcccaaacgtttgctgattggggcgttgacctgctgaaattcgatggttgctactgtgacagcctcgaaaacctggcagacggctacaagcatatgtctctcgccctgaataaaaccggtcggccaatcgtatattcctgcgagtggcctctttacatgtggccatttcagaaaccgaactacacagaaattcgccagtattgcaatcattggaggaacttcgctgatatcgatgactcatgggcctccataaagagcatcttggactggaccagtcggaatcaggagcgaattgtggatgtcgcaggccctggaggatggaacgatccagacatgctggtgatcggcaattttggcctctcttgggaccagcaggttacccaaatggctctgtgggcaattatggccggtcctcttttcatgagcaacgatctgcgcgcgatctcaccacaggcaaaggccctgctccaagacaaagatgtgatagccatcaatcaggacccgttgggaaagcagggctaccagctgagaaaaggcgacaactttgaggtctgggaaaggcctttgagtggagatgcgtgggctgtggccattattaatcggcaagagatcggaggtccacgcggttatacaattcctgtagcaattcttggcaagggcgttgcctgtaacccagcttgcttcatcactcagcttctgccggtgaagagaaaactgggtttctacgaagctaccagcaggctccgatcccacatcaaccctacaggaaccgtcctcttgcagctggagaatacgatgcagacttcactgaaggacctcctg

SEQ ID NO: 1020 - protein, 398 aa, Artificial Sequence
  variant of human alpha-galactosidase A
LDNGLARTPPMGWLHWERFMCNLDCQEEPDSCISEKLFEEMAERMVTDGWKDAGYEYLCIDDCWMAPQRDSEGRLQADPQRFPHGIRQLANHVHSKGLKLGIYADVGNKTCAGFPGSFGYYDIDAQTFADWGVDLLKFDGCYCDSLENLADGYKHMSLALNKTGRPIVYSCEWPLYMWPFQKPNYTEIRQYCNHWRNFADIDDSWASIKSILDWTSRNQERIVDVAGPGGWNDPDMLVIGNFGLSWDQQVTQMALWAIMAGPLFMSNDLRAISPQAKALLQDKDVIAINQDPLGKQGYQLRKGDNFEVWERPLSGDAWAVAIINRQEIGGPRGYTIPVAILGKGVACNPACFITQLLPVKRKLGFYEATSRLRSHINPTGTVLLQLENTMQTSLKDLL

SEQ ID NO: 1021 - DNA, 1194 bp, Artificial Sequence
  variant of human alpha-galactosidase A
ctggataatggattggctagaacacctcctatggggtggcttcactgggagaggttcatgtgcaacctggactgtcaggaagaaccagacagctgcatctccgagaagctctttgaggaaatggccgaacgaatggtgactgacggctggaaagatgcaggttacgagtatctgtgtattgacgattgctggatggccccacaacgggattctgagggaagacttcaggctgatccgcagcgcttccctcatggcataaggcagctggcaaaccacgtccacagtaaggggctcaaattgggaatctacgcggacgtgggcaataagacctgtgccggttttccgggatcattcgggtattatgacattgacgcccaaacgtttgctgattggggcgttgacctgctgaaattcgatggttgctactgtgacagcctcgaaaacctggcagacggctacaagcatatgtctctcgccctgaataaaaccggtcggccaatcgtatattcctgcgagtggcctctttacatgtggccatttcagaaaccgaactacacagaaattcgccagtattgcaatcattggaggaacttcgctgatatcgatgactcatgggcctccataaagagcatcttggactggaccagtcggaatcaggagcgaattgtggatgtcgcaggccctggaggatggaacgatccagacatgctggtgatcggcaattttggcctctcttgggaccagcaggttacccaaatggctctgtgggcaattatggccggtcctcttttcatgagcaacgatctgcgcgcgatctcaccacaggcaaaggccctgctccaagacaaagatgtgatagccatcaatcaggacccgttgggaaagcagggctaccagctgagaaaaggcgacaactttgaggtctgggaaaggcctttgagtggagatgcgtgggctgtggccattattaatcggcaagagatcggaggtccacgcggttatacaattcctgtagcaaagcttggcaagggcgttgcctgtaacccagcttgcttcatcactcagcttctgccggtgaagagaaaactgggtttctacgaagctaccagcaggctccgatcccacatcaaccctacaggaaccgtcctcttgcagctggagaatacgatgcagacttcactgaaggacctcctg

SEQ ID NO: 1022 - protein, 398 aa, Artificial Sequence
  variant of human alpha-galactosidase A
LDNGLARTPPMGWLHWERFMCNLDCQEEPDSCISEKLFEEMAERMVTDGWKDAGYEYLCIDDCWMAPQRDSEGRLQADPQRFPHGIRQLANHVHSKGLKLGIYADVGNKTCAGFPGSFGYYDIDAQTFADWGVDLLKFDGCYCDSLENLADGYKHMSLALNKTGRPIVYSCEWPLYMWPFQKPNYTEIRQYCNHWRNFADIDDSWASIKSILDWTSRNQERIVDVAGPGGWNDPDMLVIGNFGLSWDQQVTQMALWAIMAGPLFMSNDLRAISPQAKALLQDKDVIAINQDPLGKQGYQLRKGDNFEVWERPLSGDAWAVAIINRQEIGGPRGYTIPVAKLGKGVACNPACFITQLLPVKRKLGFYEATSRLRSHINPTGTVLLQLENTMQTSLKDLL

SEQ ID NO: 1023 - DNA, 1194 bp, Artificial Sequence
  variant of human alpha-galactosidase A
ctggataatggattggctagaacacctcctatggggtggcttcactgggagaggttcatgtgcaacctggactgtcaggaagaaccagacagctgcatctccgagaagctctttgaggaaatggccgaacgaatggtgactgacggctggaaagatgcaggttacgagtatctgtgtattgacgattgctggatggccccacaacgggattctgagggaagacttcaggctgatccgcagcgcttccctcatggcataaggcagctggcaaaccacgtccacagtaaggggctcaaattgggaatctacgcggacgtgggcaataagacctgtgccggttttccgggatcattcgggtattatgacattgacgcccaaacgtttgctgattggggcgttgacctgctgaaattcgatggttgctactgtgacagcctcgaaaacctggcagacggctacaagcatatgtctctcgccctgaataaaaccggtcggccaatcgtatattcctgcgagtggcctctttacatgtggccatttcagaaaccgaactacacagaaattcgccagtattgcaatcattggaggaacttcgctgatatcgatgactcatgggcctccataaagagcatcttggactggaccagtcggaatcaggagcgaattgtggatgtcgcaggccctggaggatggaacgatccagacatgctggtgatcggcaattttggcctctcttgggaccagcaggttacccaaatggctctgtgggcaattatggccggtcctcttttcatgagcaacgatctgcgcgcgatctcaccacaggcaaaggccctgctccaagacaaagatgtgatagccatcaatcaggacccgttgggaaagcagggctaccagctgagaaaaggcgacaactttgaggtctgggaaaggcctttgagtggagatgcgtgggctgtggccattattaatcggcaagagatcggaggtccacgcggttatacaattcctgtagcaatgcttggcaagggcgttgcctgtaacccagcttgcttcatcactcagcttctgccggtgaagagaaaactgggtttctacgaagctaccagcaggctccgatcccacatcaaccctacaggaaccgtcctcttgcagctggagaatacgatgcagacttcactgaaggacctcctg

SEQ ID NO: 1024 - protein, 398 aa, Artificial Sequence
  variant of human alpha-galactosidase A
LDNGLARTPPMGWLHWERFMCNLDCQEEPDSCISEKLFEEMAERMVTDGWKDAGYEYLCIDDCWMAPQRDSEGRLQADPQRFPHGIRQLANHVHSKGLKLGIYADVGNKTCAGFPGSFGYYDIDAQTFADWGVDLLKFDGCYCDSLENLADGYKHMSLALNKTGRPIVYSCEWPLYMWPFQKPNYTEIRQYCNHWRNFADIDDSWASIKSILDWTSRNQERIVDVAGPGGWNDPDMLVIGNFGLSWDQQVTQMALWAIMAGPLFMSNDLRAISPQAKALLQDKDVIAINQDPLGKQGYQLRKGDNFEVWERPLSGDAWAVAIINRQEIGGPRGYTIPVAMLGKGVACNPACFITQLLPVKRKLGFYEATSRLRSHINPTGTVLLQLENTMQTSLKDLL

SEQ ID NO: 1025 - DNA, 1194 bp, Artificial Sequence
  variant of human alpha-galactosidase A
ctggataatggattggctagaacacctcctatggggtggcttcactgggagaggttcatgtgcaacctggactgtcaggaagaaccagacagctgcatctccgagaagctctttgaggaaatggccgaacgaatggtgactgacggctggaaagatgcaggttacgagtatctgtgtattgacgattgctggatggccccacaacgggattctgagggaagacttcaggctgatccgcagcgcttccctcatggcataaggcagctggcaaaccacgtccacagtaaggggctcaaattgggaatctacgcggacgtgggcaataagacctgtgccggttttccgggatcattcgggtattatgacattgacgcccaaacgtttgctgattggggcgttgacctgctgaaattcgatggttgctactgtgacagcctcgaaaacctggcagacggctacaagcatatgtctctcgccctgaataaaaccggtcggccaatcgtatattcctgcgagtggcctctttacatgtggccatttcagaaaccgaactacacagaaattcgccagtattgcaatcattggaggaacttcgctgatatcgatgactcatgggcctccataaagagcatcttggactggaccagtcggaatcaggagcgaattgtggatgtcgcaggccctggaggatggaacgatccagacatgctggtgatcggcaattttggcctctcttgggaccagcaggttacccaaatggctctgtgggcaattatggccggtcctcttttcatgagcaacgatctgcgcgcgatctcaccacaggcaaaggccctgctccaagacaaagatgtgatagccatcaatcaggacccgttgggaaagcagggctaccagctgagaaaaggcgacaactttgaggtctgggaaaggcctttgagtggagatgcgtgggctgtggccattattaatcggcaagagatcggaggtccacgcggttatacaattcctgtagcacctcttggcaagggcgttgcctgtaacccagcttgcttcatcactcagcttctgccggtgaagagaaaactgggtttctacgaagctaccagcaggctccgatcccacatcaaccctacaggaaccgtcctcttgcagctggagaatacgatgcagacttcactgaaggacctcctg

SEQ ID NO: 1026 - protein, 398 aa, Artificial Sequence
  variant of human alpha-galactosidase A
LDNGLARTPPMGWLHWERFMCNLDCQEEPDSCISEKLFEEMAERMVTDGWKDAGYEYLCIDDCWMAPQRDSEGRLQADPQRFPHGIRQLANHVHSKGLKLGIYADVGNKTCAGFPGSFGYYDIDAQTFADWGVDLLKFDGCYCDSLENLADGYKHMSLALNKTGRPIVYSCEWPLYMWPFQKPNYTEIRQYCNHWRNFADIDDSWASIKSILDWTSRNQERIVDVAGPGGWNDPDMLVIGNFGLSWDQQVTQMALWAIMAGPLFMSNDLRAISPQAKALLQDKDVIAINQDPLGKQGYQLRKGDNFEVWERPLSGDAWAVAIINRQEIGGPRGYTIPVAPLGKGVACNPACFITQLLPVKRKLGFYEATSRLRSHINPTGTVLLQLENTMQTSLKDLL

SEQ ID NO: 1027 - DNA, 1194 bp, Artificial Sequence
  variant of human alpha-galactosidase A
ctggataatggattggctagaacacctcctatggggtggcttcactgggagaggttcatgtgcaacctggactgtcaggaagaaccagacagctgcatctccgagaagctctttgaggaaatggccgaacgaatggtgactgacggctggaaagatgcaggttacgagtatctgtgtattgacgattgctggatggccccacaacgggattctgagggaagacttcaggctgatccgcagcgcttccctcatggcataaggcagctggcaaaccacgtccacagtaaggggctcaaattgggaatctacgcggacgtgggcaataagacctgtgccggttttccgggatcattcgggtattatgacattgacgcccaaacgtttgctgattggggcgttgacctgctgaaattcgatggttgctactgtgacagcctcgaaaacctggcagacggctacaagcatatgtctctcgccctgaataaaaccggtcggccaatcgtatattcctgcgagtggcctctttacatgtggccatttcagaaaccgaactacacagaaattcgccagtattgcaatcattggaggaacttcgctgatatcgatgactcatgggcctccataaagagcatcttggactggaccagtcggaatcaggagcgaattgtggatgtcgcaggccctggaggatggaacgatccagacatgctggtgatcggcaattttggcctctcttgggaccagcaggttacccaaatggctctgtgggcaattatggccggtcctcttttcatgagcaacgatctgcgcgcgatctcaccacaggcaaaggccctgctccaagacaaagatgtgatagccatcaatcaggacccgttgggaaagcagggctaccagctgagaaaaggcgacaactttgaggtctgggaaaggcctttgagtggagatgcgtgggctgtggccattattaatcggcaagagatcggaggtccacgcggttatacaattcctgtagcatggcttggcaagggcgttgcctgtaacccagcttgcttcatcactcagcttctgccggtgaagagaaaactgggtttctacgaagctaccagcaggctccgatcccacatcaaccctacaggaaccgtcctcttgcagctggagaatacgatgcagacttcactgaaggacctcctg

SEQ ID NO: 1028 - protein, 398 aa, Artificial Sequence
  variant of human alpha-galactosidase A
LDNGLARTPPMGWLHWERFMCNLDCQEEPDSCISEKLFEEMAERMVTDGWKDAGYEYLCIDDCWMAPQRDSEGRLQADPQRFPHGIRQLANHVHSKGLKLGIYADVGNKTCAGFPGSFGYYDIDAQTFADWGVDLLKFDGCYCDSLENLADGYKHMSLALNKTGRPIVYSCEWPLYMWPFQKPNYTEIRQYCNHWRNFADIDDSWASIKSILDWTSRNQERIVDVAGPGGWNDPDMLVIGNFGLSWDQQVTQMALWAIMAGPLFMSNDLRAISPQAKALLQDKDVIAINQDPLGKQGYQLRKGDNFEVWERPLSGDAWAVAIINRQEIGGPRGYTIPVAWLGKGVACNPACFITQLLPVKRKLGFYEATSRLRSHINPTGTVLLQLENTMQTSLKDLL

SEQ ID NO: 1029 - DNA, 1194 bp, Artificial Sequence
  variant of human alpha-galactosidase A
ctggataatggattggctagaacacctcctatggggtggcttcactgggagaggttcatgtgcaacctggactgtcaggaagaaccagacagctgcatctccgagaagctctttgaggaaatggccgaacgaatggtgactgacggctggaaagatgcaggttacgagtatctgtgtattgacgattgctggatggccccacaacgggattctgagggaagacttcaggctgatccgcagcgcttccctcatggcataaggcagctggcaaaccacgtccacagtaaggggctcaaattgggaatctacgcggacgtgggcaataagacctgtgccggttttccgggatcattcgggtattatgacattgacgcccaaacgtttgctgattggggcgttgacctgctgaaattcgatggttgctactgtgacagcctcgaaaacctggcagacggctacaagcatatgtctctcgccctgaataaaaccggtcggccaatcgtatattcctgcgagtggcctctttacatgtggccatttcagaaaccgaactacgaggaaattcgccagtattgcaatcattggaggaacttcgctgatatcgatgactcatgggcctccataaagagcatcttggactggaccagtcggaatcaggagcgaattgtggatgtcgcaggccctggaggatggaacgatccagacatgctggtgatcggcaattttggcctctcttgggaccagcaggttacccaaatggctctgtgggcaattatggccggtcctcttttcatgagcaacgatctgcgcgcgatctcaccacaggcaaaggccctgctccaagacaaagatgtgatagccatcaatcaggacccgttgggaaagcagggctaccagctgagaaaaggcgacaactttgaggtctgggaaaggcctttgagtggagatgcgtgggctgtggccattattaatcggcaagagatcggaggtccacgcggttatacaattcctgtagcatctcttggcaagggcgttgcctgtaacccagcttgcttcatcactcagcttctgccggtgaagagaaaactgggtttctacgaagctaccagcaggctccgatcccacatcaaccctacaggaaccgtcctcttgcagctggagaatacgatgcagacttcactgaaggacctcctg

SEQ ID NO: 1030 - protein, 398 aa, Artificial Sequence
  variant of human alpha-galactosidase A
LDNGLARTPPMGWLHWERFMCNLDCQEEPDSCISEKLFEEMAERMVTDGWKDAGYEYLCIDDCWMAPQRDSEGRLQADPQRFPHGIRQLANHVHSKGLKLGIYADVGNKTCAGFPGSFGYYDIDAQTFADWGVDLLKFDGCYCDSLENLADGYKHMSLALNKTGRPIVYSCEWPLYMWPFQKPNYEEIRQYCNHWRNFADIDDSWASIKSILDWTSRNQERIVDVAGPGGWNDPDMLVIGNFGLSWDQQVTQMALWAIMAGPLFMSNDLRAISPQAKALLQDKDVIAINQDPLGKQGYQLRKGDNFEVWERPLSGDAWAVAIINRQEIGGPRGYTIPVASLGKGVACNPACFITQLLPVKRKLGFYEATSRLRSHINPTGTVLLQLENTMQTSLKDLL

SEQ ID NO: 1031 - DNA, 1194 bp, Artificial Sequence
  variant of human alpha-galactosidase A
ctggataatggattggctagaacacctcctatggggtggcttcactgggagaggttcatgtgcaacctggactgtcaggaagaaccagacagctgcatctccgagaagctctttgaggaaatggccgaacgaatggtgactgacggctggaaagatgcaggttacgagtatctgtgtattgacgattgctggatggccccacaacgggattctgagggaagacttcaggctgatccgcagcgcttccctcatggcataaggcagctggcaaaccacgtccacagtaaggggctcaaattgggaatctacgcggacgtgggcaataagacctgtgccggttttccgggatcattcgggtattatgacattgacgcccaaacgtttgctgattggggcgttgacctgctgaaattcgatggttgctactgtgacagcctcgaaaacctggcagacggctacaagcatatgtctctcgccctgaataaaaccggtcggccaatcgtatattcctgcgagtggcctctttacatgtggccatttcagaaaccgaactactttgaaattcgccagtattgcaatcattggaggaacttcgctgatatcgatgactcatgggcctccataaagagcatcttggactggaccagtcggaatcaggagcgaattgtggatgtcgcaggccctggaggatggaacgatccagacatgctggtgatcggcaattttggcctctcttgggaccagcaggttacccaaatggctctgtgggcaattatggccggtcctcttttcatgagcaacgatctgcgcgcgatctcaccacaggcaaaggccctgctccaagacaaagatgtgatagccatcaatcaggacccgttgggaaagcagggctaccagctgagaaaaggcgacaactttgaggtctgggaaaggcctttgagtggagatgcgtgggctgtggccattattaatcggcaagagatcggaggtccacgcggttatacaattcctgtagcatctcttggcaagggcgttgcctgtaacccagcttgcttcatcactcagcttctgccggtgaagagaaaactgggtttctacgaagctaccagcaggctccgatcccacatcaaccctacaggaaccgtcctcttgcagctggagaatacgatgcagacttcactgaaggacctcctg

SEQ ID NO: 1032 - protein, 398 aa, Artificial Sequence
  variant of human alpha-galactosidase A
LDNGLARTPPMGWLHWERFMCNLDCQEEPDSCISEKLFEEMAERMVTDGWKDAGYEYLCIDDCWMAPQRDSEGRLQADPQRFPHGIRQLANHVHSKGLKLGIYADVGNKTCAGFPGSFGYYDIDAQTFADWGVDLLKFDGCYCDSLENLADGYKHMSLALNKTGRPIVYSCEWPLYMWPFQKPNYFEIRQYCNHWRNFADIDDSWASIKSILDWTSRNQERIVDVAGPGGWNDPDMLVIGNFGLSWDQQVTQMALWAIMAGPLFMSNDLRAISPQAKALLQDKDVIAINQDPLGKQGYQLRKGDNFEVWERPLSGDAWAVAIINRQEIGGPRGYTIPVASLGKGVACNPACFITQLLPVKRKLGFYEATSRLRSHINPTGTVLLQLENTMQTSLKDLL

SEQ ID NO: 1033 - DNA, 1194 bp, Artificial Sequence
  variant of human alpha-galactosidase A
ctggataatggattggctagaacacctcctatggggtggcttcactgggagaggttcatgtgcaacctggactgtcaggaagaaccagacagctgcatctccgagaagctctttgaggaaatggccgaacgaatggtgactgacggctggaaagatgcaggttacgagtatctgtgtattgacgattgctggatggccccacaacgggattctgagggaagacttcaggctgatccgcagcgcttccctcatggcataaggcagctggcaaaccacgtccacagtaaggggctcaaattgggaatctacgcggacgtgggcaataagacctgtgccggttttccgggatcattcgggtattatgacattgacgcccaaacgtttgctgattggggcgttgacctgctgaaattcgatggttgctactgtgacagcctcgaaaacctggcagacggctacaagcatatgtctctcgccctgaataaaaccggtcggccaatcgtatattcctgcgagtggcctctttacatgtggccatttcagaaaccgaactacatggaaattcgccagtattgcaatcattggaggaacttcgctgatatcgatgactcatgggcctccataaagagcatcttggactggaccagtcggaatcaggagcgaattgtggatgtcgcaggccctggaggatggaacgatccagacatgctggtgatcggcaattttggcctctcttgggaccagcaggttacccaaatggctctgtgggcaattatggccggtcctcttttcatgagcaacgatctgcgcgcgatctcaccacaggcaaaggccctgctccaagacaaagatgtgatagccatcaatcaggacccgttgggaaagcagggctaccagctgagaaaaggcgacaactttgaggtctgggaaaggcctttgagtggagatgcgtgggctgtggccattattaatcggcaagagatcggaggtccacgcggttatacaattcctgtagcatctcttggcaagggcgttgcctgtaacccagcttgcttcatcactcagcttctgccggtgaagagaaaactgggtttctacgaagctaccagcaggctccgatcccacatcaaccctacaggaaccgtcctcttgcagctggagaatacgatgcagacttcactgaaggacctcctg

SEQ ID NO: 1034 - protein, 398 aa, Artificial Sequence
  variant of human alpha-galactosidase A
LDNGLARTPPMGWLHWERFMCNLDCQEEPDSCISEKLFEEMAERMVTDGWKDAGYEYLCIDDCWMAPQRDSEGRLQADPQRFPHGIRQLANHVHSKGLKLGIYADVGNKTCAGFPGSFGYYDIDAQTFADWGVDLLKFDGCYCDSLENLADGYKHMSLALNKTGRPIVYSCEWPLYMWPFQKPNYMEIRQYCNHWRNFADIDDSWASIKSILDWTSRNQERIVDVAGPGGWNDPDMLVIGNFGLSWDQQVTQMALWAIMAGPLFMSNDLRAISPQAKALLQDKDVIAINQDPLGKQGYQLRKGDNFEVWERPLSGDAWAVAIINRQEIGGPRGYTIPVASLGKGVACNPACFITQLLPVKRKLGFYEATSRLRSHINPTGTVLLQLENTMQTSLKDLL

SEQ ID NO: 1035 - DNA, 1194 bp, Artificial Sequence
  variant of human alpha-galactosidase A
ctggataatggattggctagaacacctcctatggggtggcttcactgggagaggttcatgtgcaacctggactgtcaggaagaaccagacagctgcatctccgagaagctctttgaggaaatggccgaacgaatggtgactgacggctggaaagatgcaggttacgagtatctgtgtattgacgattgctggatggccccacaacgggattctgagggaagacttcaggctgatccgcagcgcttccctcatggcataaggcagctggcaaaccacgtccacagtaaggggctcaaattgggaatctacgcggacgtgggcaataagacctgtgccggttttccgggatcattcgggtattatgacattgacgcccaaacgtttgctgattggggcgttgacctgctgaaattcgatggttgctactgtgacagcctcgaaaacctggcagacggctacaagcatatgtctctcgccctgaataaaaccggtcggccaatcgtatattcctgcgagtggcctctttacatgtggccatttcagaaaccgaactaccctgaaattcgccagtattgcaatcattggaggaacttcgctgatatcgatgactcatgggcctccataaagagcatcttggactggaccagtcggaatcaggagcgaattgtggatgtcgcaggccctggaggatggaacgatccagacatgctggtgatcggcaattttggcctctcttgggaccagcaggttacccaaatggctctgtgggcaattatggccggtcctcttttcatgagcaacgatctgcgcgcgatctcaccacaggcaaaggccctgctccaagacaaagatgtgatagccatcaatcaggacccgttgggaaagcagggctaccagctgagaaaaggcgacaactttgaggtctgggaaaggcctttgagtggagatgcgtgggctgtggccattattaatcggcaagagatcggaggtccacgcggttatacaattcctgtagcatctcttggcaagggcgttgcctgtaacccagcttgcttcatcactcagcttctgccggtgaagagaaaactgggtttctacgaagctaccagcaggctccgatcccacatcaaccctacaggaaccgtcctcttgcagctggagaatacgatgcagacttcactgaaggacctcctg

SEQ ID NO: 1036 - protein, 398 aa, Artificial Sequence
  variant of human alpha-galactosidase A
LDNGLARTPPMGWLHWERFMCNLDCQEEPDSCISEKLFEEMAERMVTDGWKDAGYEYLCIDDCWMAPQRDSEGRLQADPQRFPHGIRQLANHVHSKGLKLGIYADVGNKTCAGFPGSFGYYDIDAQTFADWGVDLLKFDGCYCDSLENLADGYKHMSLALNKTGRPIVYSCEWPLYMWPFQKPNYPEIRQYCNHWRNFADIDDSWASIKSILDWTSRNQERIVDVAGPGGWNDPDMLVIGNFGLSWDQQVTQMALWAIMAGPLFMSNDLRAISPQAKALLQDKDVIAINQDPLGKQGYQLRKGDNFEVWERPLSGDAWAVAIINRQEIGGPRGYTIPVASLGKGVACNPACFITQLLPVKRKLGFYEATSRLRSHINPTGTVLLQLENTMQTSLKDLL

SEQ ID NO: 1037 - DNA, 1194 bp, Artificial Sequence
  variant of human alpha-galactosidase A
ctggataatggattggctagaacacctcctatggggtggcttcactgggagaggttcatgtgcaacctggactgtcaggaagaaccagacagctgcatctccgagaagctctttgaggaaatggccgaacgaatggtgactgacggctggaaagatgcaggttacgagtatctgtgtattgacgattgctggatggccccacaacgggattctgagggaagacttcaggctgatccgcagcgcttccctcatggcataaggcagctggcaaaccacgtccacagtaaggggctcaaattgggaatctacgcggacgtgggcaataagacctgtgccggttttccgggatcattcgggtattatgacattgacgcccaaacgtttgctgattggggcgttgacctgctgaaattcgatggttgctactgtgacagcctcgaaaacctggcagacggctacaagcatatgtctctcgccctgaataaaaccggtcggccaatcgtatattcctgcgagtggcctctttacatgtggccatttcagaaaccgaactacagggaaattcgccagtattgcaatcattggaggaacttcgctgatatcgatgactcatgggcctccataaagagcatcttggactggaccagtcggaatcaggagcgaattgtggatgtcgcaggccctggaggatggaacgatccagacatgctggtgatcggcaattttggcctctcttgggaccagcaggttacccaaatggctctgtgggcaattatggccggtcctcttttcatgagcaacgatctgcgcgcgatctcaccacaggcaaaggccctgctccaagacaaagatgtgatagccatcaatcaggacccgttgggaaagcagggctaccagctgagaaaaggcgacaactttgaggtctgggaaaggcctttgagtggagatgcgtgggctgtggccattattaatcggcaagagatcggaggtccacgcggttatacaattcctgtagcatctcttggcaagggcgttgcctgtaacccagcttgcttcatcactcagcttctgccggtgaagagaaaactgggtttctacgaagctaccagcaggctccgatcccacatcaaccctacaggaaccgtcctcttgcagctggagaatacgatgcagacttcactgaaggacctcctg

SEQ ID NO: 1038 - protein, 398 aa, Artificial Sequence
  variant of human alpha-galactosidase A
LDNGLARTPPMGWLHWERFMCNLDCQEEPDSCISEKLFEEMAERMVTDGWKDAGYEYLCIDDCWMAPQRDSEGRLQADPQRFPHGIRQLANHVHSKGLKLGIYADVGNKTCAGFPGSFGYYDIDAQTFADWGVDLLKFDGCYCDSLENLADGYKHMSLALNKTGRPIVYSCEWPLYMWPFQKPNYREIRQYCNHWRNFADIDDSWASIKSILDWTSRNQERIVDVAGPGGWNDPDMLVIGNFGLSWDQQVTQMALWAIMAGPLFMSNDLRAISPQAKALLQDKDVIAINQDPLGKQGYQLRKGDNFEVWERPLSGDAWAVAIINRQEIGGPRGYTIPVASLGKGVACNPACFITQLLPVKRKLGFYEATSRLRSHINPTGTVLLQLENTMQTSLKDLL

SEQ ID NO: 1039 - DNA, 1194 bp, Artificial Sequence
  variant of human alpha-galactosidase A
ctggataatggattggctagaacacctcctatggggtggcttcactgggagaggttcatgtgcaacctggactgtcaggaagaaccagacagctgcatctccgagaagctctttgaggaaatggccgaacgaatggtgactgacggctggaaagatgcaggttacgagtatctgtgtattgacgattgctggatggccccacaacgggattctgagggaagacttcaggctgatccgcagcgcttccctcatggcataaggcagctggcaaaccacgtccacagtaaggggctcaaattgggaatctacgcggacgtgggcaataagacctgtgccggttttccgggatcattcgggtattatgacattgacgcccaaacgtttgctgattggggcgttgacctgctgaaattcgatggttgctactgtgacagcctcgaaaacctggcagacggctacaagcatatgtctctcgccctgaataaaaccggtcggccaatcgtatattcctgcgagtggcctctttacatgtggccatttcagaaaccgaactactcggaaattcgccagtattgcaatcattggaggaacttcgctgatatcgatgactcatgggcctccataaagagcatcttggactggaccagtcggaatcaggagcgaattgtggatgtcgcaggccctggaggatggaacgatccagacatgctggtgatcggcaattttggcctctcttgggaccagcaggttacccaaatggctctgtgggcaattatggccggtcctcttttcatgagcaacgatctgcgcgcgatctcaccacaggcaaaggccctgctccaagacaaagatgtgatagccatcaatcaggacccgttgggaaagcagggctaccagctgagaaaaggcgacaactttgaggtctgggaaaggcctttgagtggagatgcgtgggctgtggccattattaatcggcaagagatcggaggtccacgcggttatacaattcctgtagcatctcttggcaagggcgttgcctgtaacccagcttgcttcatcactcagcttctgccggtgaagagaaaactgggtttctacgaagctaccagcaggctccgatcccacatcaaccctacaggaaccgtcctcttgcagctggagaatacgatgcagacttcactgaaggacctcctg

SEQ ID NO: 1040 - protein, 398 aa, Artificial Sequence
  variant of human alpha-galactosidase A
LDNGLARTPPMGWLHWERFMCNLDCQEEPDSCISEKLFEEMAERMVTDGWKDAGYEYLCIDDCWMAPQRDSEGRLQADPQRFPHGIRQLANHVHSKGLKLGIYADVGNKTCAGFPGSFGYYDIDAQTFADWGVDLLKFDGCYCDSLENLADGYKHMSLALNKTGRPIVYSCEWPLYMWPFQKPNYSEIRQYCNHWRNFADIDDSWASIKSILDWTSRNQERIVDVAGPGGWNDPDMLVIGNFGLSWDQQVTQMALWAIMAGPLFMSNDLRAISPQAKALLQDKDVIAINQDPLGKQGYQLRKGDNFEVWERPLSGDAWAVAIINRQEIGGPRGYTIPVASLGKGVACNPACFITQLLPVKRKLGFYEATSRLRSHINPTGTVLLQLENTMQTSLKDLL

SEQ ID NO: 1041 - DNA, 1194 bp, Artificial Sequence
  variant of human alpha-galactosidase A
ctggataatggattggctagaacacctcctatggggtggcttcactgggagaggttcatgtgcaacctggactgtcaggaagaaccagacagctgcatctccgagaagctctttgaggaaatggccgaacgaatggtgactgacggctggaaagatgcaggttacgagtatctgtgtattgacgattgctggatggccccacaacgggattctgagggaagacttcaggctgatccgcagcgcttccctcatggcataaggcagctggcaaaccacgtccacagtaaggggctcaaattgggaatctacgcggacgtgggcaataagacctgtgccggttttccgggatcattcgggtattatgacattgacgcccaaacgtttgctgattggggcgttgacctgctgaaattcgatggttgctactgtgacagcctcgaaaacctggcagacggctacaagcatatgtctctcgccctgaataaaaccggtcggccaatcgtatattcctgcgagtggcctctttacatgtggccatttcagaaaccgaactactatgaaattcgccagtattgcaatcattggaggaacttcgctgatatcgatgactcatgggcctccataaagagcatcttggactggaccagtcggaatcaggagcgaattgtggatgtcgcaggccctggaggatggaacgatccagacatgctggtgatcggcaattttggcctctcttgggaccagcaggttacccaaatggctctgtgggcaattatggccggtcctcttttcatgagcaacgatctgcgcgcgatctcaccacaggcaaaggccctgctccaagacaaagatgtgatagccatcaatcaggacccgttgggaaagcagggctaccagctgagaaaaggcgacaactttgaggtctgggaaaggcctttgagtggagatgcgtgggctgtggccattattaatcggcaagagatcggaggtccacgcggttatacaattcctgtagcatctcttggcaagggcgttgcctgtaacccagcttgcttcatcactcagcttctgccggtgaagagaaaactgggtttctacgaagctaccagcaggctccgatcccacatcaaccctacaggaaccgtcctcttgcagctggagaatacgatgcagacttcactgaaggacctcctg

SEQ ID NO: 1042 - protein, 398 aa, Artificial Sequence
  variant of human alpha-galactosidase A
LDNGLARTPPMGWLHWERFMCNLDCQEEPDSCISEKLFEEMAERMVTDGWKDAGYEYLCIDDCWMAPQRDSEGRLQADPQRFPHGIRQLANHVHSKGLKLGIYADVGNKTCAGFPGSFGYYDIDAQTFADWGVDLLKFDGCYCDSLENLADGYKHMSLALNKTGRPIVYSCEWPLYMWPFQKPNYYEIRQYCNHWRNFADIDDSWASIKSILDWTSRNQERIVDVAGPGGWNDPDMLVIGNFGLSWDQQVTQMALWAIMAGPLFMSNDLRAISPQAKALLQDKDVIAINQDPLGKQGYQLRKGDNFEVWERPLSGDAWAVAIINRQEIGGPRGYTIPVASLGKGVACNPACFITQLLPVKRKLGFYEATSRLRSHINPTGTVLLQLENTMQTSLKDLL

SEQ ID NO: 1043 - DNA, 1194 bp, Artificial Sequence
  variant of human alpha-galactosidase A
ctggataatggattggctagaacacctcctatggggtggcttcactgggagaggttcatgtgcaacctggactgtcaggaagaaccagacagctgcatctccgagaagctctttgaggaaatggccgaacgaatggtgactgacggctggaaagatgcaggttacgagtatctgtgtattgacgattgctggatggccccacaacgggattctgagggaagacttcaggctgatccgcagcgcttccctcatggcataaggcagctggcaaaccacgtccacagtaaggggctcaaattgggaatctacgcggacgtgggcaataagacctgtgccggttttccgggatcattcgggtattatgacattgacgcccaaacgtttgctgattggggcgttgacctgctgaaattcgatggttgctactgtgacagcctcgaaaacctggcagacggctacaagcatatgtctctcgccctgaataaaaccggtcggccaatcgtatattcctgcgagtggcctctttacatgtggccatttcagaaaccgaactacacagaaattcgccagtattgcaatcattggaggaacttcgctgatatcgatgactcatgggcctccataaagagcatcttggactggagtagtcggtaccaggagcgaattgtggatgtcgcaggccctggaggatggaacgatccagacatgctggtgatcggcaattttggcctctcttgggaccagcaggttacccaaatggctctgtgggcaattatggccggtcctcttttcatgagcaacgatctgcgcgcgatctcaccacaggcaaaggccctgctccaagacaaagatgtgatagccatcaatcaggacccgttgggaaagcagggctaccagctgagaaaaggcgacaactttgaggtctgggaaaggcctttgagtggagatgcgtgggctgtggccattattaatcggcaagagatcggaggtccacgcggttatacaattcctgtagcatctcttggcaagggcgttgcctgtaacccagcttgcttcatcactcagcttctgccggtgaagagaaaactgggtttctacgaagctaccagcaggctccgatcccacatcaaccctacaggaaccgtcctcttgcagctggagaatacgatgcagacttcactgaaggacctcctg

SEQ ID NO: 1044 - protein, 398 aa, Artificial Sequence
  variant of human alpha-galactosidase A
LDNGLARTPPMGWLHWERFMCNLDCQEEPDSCISEKLFEEMAERMVTDGWKDAGYEYLCIDDCWMAPQRDSEGRLQADPQRFPHGIRQLANHVHSKGLKLGIYADVGNKTCAGFPGSFGYYDIDAQTFADWGVDLLKFDGCYCDSLENLADGYKHMSLALNKTGRPIVYSCEWPLYMWPFQKPNYTEIRQYCNHWRNFADIDDSWASIKSILDWSSRYQERIVDVAGPGGWNDPDMLVIGNFGLSWDQQVTQMALWAIMAGPLFMSNDLRAISPQAKALLQDKDVIAINQDPLGKQGYQLRKGDNFEVWERPLSGDAWAVAIINRQEIGGPRGYTIPVASLGKGVACNPACFITQLLPVKRKLGFYEATSRLRSHINPTGTVLLQLENTMQTSLKDLL

SEQ ID NO: 1045 - DNA, 1194 bp, Artificial Sequence
  variant of human alpha-galactosidase A
ctggataatggattggctagaacacctcctatggggtggcttcactgggagaggttcatgtgcaacctggactgtcaggaagaaccagacagctgcatctccgagaagctctttgaggaaatggccgaacgaatggtgactgacggctggaaagatgcaggttacgagtatctgtgtattgacgattgctggatggccccacaacgggattctgagggaagacttcaggctgatccgcagcgcttccctcatggcataaggcagctggcaaaccacgtccacagtaaggggctcaaattgggaatctacgcggacgtgggcaataagacctgtgccggttttccgggatcattcgggtattatgacattgacgcccaaacgtttgctgattggggcgttgacctgctgaaattcgatggttgctactgtgacagcctcgaaaacctggcagacggctacaagcatatgtctctcgccctgaataaaaccggtcggccaatcgtatattcctgcgagtggcctctttacatgtggccatttcagaaaccgaactacacagaaattcgccagtattgcaatcattggaggaacttcgctgatatcgatgactcatgggcctccataaagagcatcttggactggaccagtcggaatcaggagcgaattgtggatgtcgcaggccctggaggatggaacgatccagacatgctggtgatcggcaattttggcctctcttgggaccagcaggttacccaaatggctctgtgggcaattatggccggtcctcttttcatgagcaacgatctgcgcgcgatctcaccacaggcaaaggccctgctccaagacaaagatgtgatagccatcaatcaggacccgttgggaaagcagggctaccagctgagaaaaggcgacaactttgaggtctgggaaaggcctttgagtggagatgcgtgggctgtggccattattaatcggcaagagatcggaggtccacgcggttatgcgattcctgtagcatctcttggcaagggcgttgcctgtaacccagcttgcttcatcactcagcttctgccggtgaagagaaaactgggtttctacgaagctaccagcaggctccgatcccacatcaaccctacaggaaccgtcctcttgcagctggagaatacgatgcagacttcactgaaggacctcctg

SEQ ID NO: 1046 - protein, 398 aa, Artificial Sequence
  variant of human alpha-galactosidase A
LDNGLARTPPMGWLHWERFMCNLDCQEEPDSCISEKLFEEMAERMVTDGWKDAGYEYLCIDDCWMAPQRDSEGRLQADPQRFPHGIRQLANHVHSKGLKLGIYADVGNKTCAGFPGSFGYYDIDAQTFADWGVDLLKFDGCYCDSLENLADGYKHMSLALNKTGRPIVYSCEWPLYMWPFQKPNYTEIRQYCNHWRNFADIDDSWASIKSILDWTSRNQERIVDVAGPGGWNDPDMLVIGNFGLSWDQQVTQMALWAIMAGPLFMSNDLRAISPQAKALLQDKDVIAINQDPLGKQGYQLRKGDNFEVWERPLSGDAWAVAIINRQEIGGPRGYAIPVASLGKGVACNPACFITQLLPVKRKLGFYEATSRLRSHINPTGTVLLQLENTMQTSLKDLL

SEQ ID NO: 1047 - DNA, 1194 bp, Artificial Sequence
  variant of human alpha-galactosidase A
ctggataatggattggctagaacacctcctatggggtggcttcactgggagaggttcatgtgcaacctggactgtcaggaagaaccagacagctgcatctccgagaagctctttgaggaaatggccgaacgaatggtgactgacggctggaaagatgcaggttacgagtatctgtgtattgacgattgctggatggccccacaacgggattctgagggaagacttcaggctgatccgcagcgcttccctcatggcataaggcagctggcaaaccacgtccacagtaaggggctcaaattgggaatctacgcggacgtgggcaataagacctgtgccggttttccgggatcattcgggtattatgacattgacgcccaaacgtttgctgattggggcgttgacctgctgaaattcgatggttgctactgtgacagcctcgaaaacctggcagacggctacaagcatatgtctctcgccctgaataaaaccggtcggccaatcgtatattcctgcgagtggcctctttacatgtggccatttcagaaaccgaactacacagaaattcgccagtattgcaatcattggaggaacttcgctgatatcgatgactcatgggcctccataaagagcatcttggactggaccagtcggaatcaggagcgaattgtggatgtcgcaggccctggaggatggaacgatccagacatgctggtgatcggcaattttggcctctcttgggaccagcaggttacccaaatggctctgtgggcaattatggccggtcctcttttcatgagcaacgatctgcgcgcgatctcaccacaggcaaaggccctgctccaagacaaagatgtgatagccatcaatcaggacccgttgggaaagcagggctaccagctgagaaaaggcgacaactttgaggtctgggaaaggcctttgagtggagatgcgtgggctgtggccattattaatcggcaagagatcggaggtccacgcggttatctgattcctgtagcatctcttggcaagggcgttgcctgtaacccagcttgcttcatcactcagcttctgccggtgaagagaaaactgggtttctacgaagctaccagcaggctccgatcccacatcaaccctacaggaaccgtcctcttgcagctggagaatacgatgcagacttcactgaaggacctcctg

SEQ ID NO: 1048 - protein, 398 aa, Artificial Sequence
  variant of human alpha-galactosidase A
LDNGLARTPPMGWLHWERFMCNLDCQEEPDSCISEKLFEEMAERMVTDGWKDAGYEYLCIDDCWMAPQRDSEGRLQADPQRFPHGIRQLANHVHSKGLKLGIYADVGNKTCAGFPGSFGYYDIDAQTFADWGVDLLKFDGCYCDSLENLADGYKHMSLALNKTGRPIVYSCEWPLYMWPFQKPNYTEIRQYCNHWRNFADIDDSWASIKSILDWTSRNQERIVDVAGPGGWNDPDMLVIGNFGLSWDQQVTQMALWAIMAGPLFMSNDLRAISPQAKALLQDKDVIAINQDPLGKQGYQLRKGDNFEVWERPLSGDAWAVAIINRQEIGGPRGYLIPVASLGKGVACNPACFITQLLPVKRKLGFYEATSRLRSHINPTGTVLLQLENTMQTSLKDLL

SEQ ID NO: 1049 - DNA, 1194 bp, Artificial Sequence
  variant of human alpha-galactosidase A
ctggataatggattggctagaacacctcctatggggtggcttcactgggagaggttcatgtgcaacctggactgtcaggaagaaccagacagctgcatctccgagaagctctttgaggaaatggccgaacgaatggtgactgacggctggaaagatgcaggttacgagtatctgtgtattgacgattgctggatggccccacaacgggattctgagggaagacttcaggctgatccgcagcgcttccctcatggcataaggcagctggcaaaccacgtccacagtaaggggctcaaattgggaatctacgcggacgtgggcaataagacctgtgccggttttccgggatcattcgggtattatgacattgacgcccaaacgtttgctgattggggcgttgacctgctgaaattcgatggttgctactgtgacagcctcgaaaacctggcagacggctacaagcatatgtctctcgccctgaataaaaccggtcggccaatcgtatattcctgcgagtggcctctttacatgtggccatttcagaaaccgaactacacagaaattcgccagtattgcaatcattggaggaacttcgctgatatcgatgactcatgggcctccataaagagcatcttggactggaccagtcggaatcaggagcgaattgtggatgtcgcaggccctggaggatggaacgatccagacatgctggtgatcggcaattttggcctctcttgggaccagcaggttacccaaatggctctgtgggcaattatggccggtcctcttttcatgagcaacgatctgcgcgcgatctcaccacaggcaaaggccctgctccaagacaaagatgtgatagccatcaatcaggacccgttgggaaagcagggctaccagctgagaaaaggcgacaactttgaggtctgggaaaggcctttgagtggagatgcgtgggctgtggccattattaatcggcaagagatcggaggtccacgcggttatacaattcctgtagcatctcttggcaagggcgttgcctgtaacccagcttgcttcatcactcagcttctgccggtgaagagaaaactgggtttctacgaagctgatagcaggctccgatcccacatcaaccctacaggaaccgtcctcttgcagctggagaatacgatgcagacttcactgaaggacctcctg

SEQ ID NO: 1050 - protein, 398 aa, Artificial Sequence
  variant of human alpha-galactosidase A
LDNGLARTPPMGWLHWERFMCNLDCQEEPDSCISEKLFEEMAERMVTDGWKDAGYEYLCIDDCWMAPQRDSEGRLQADPQRFPHGIRQLANHVHSKGLKLGIYADVGNKTCAGFPGSFGYYDIDAQTFADWGVDLLKFDGCYCDSLENLADGYKHMSLALNKTGRPIVYSCEWPLYMWPFQKPNYTEIRQYCNHWRNFADIDDSWASIKSILDWTSRNQERIVDVAGPGGWNDPDMLVIGNFGLSWDQQVTQMALWAIMAGPLFMSNDLRAISPQAKALLQDKDVIAINQDPLGKQGYQLRKGDNFEVWERPLSGDAWAVAIINRQEIGGPRGYTIPVASLGKGVACNPACFITQLLPVKRKLGFYEADSRLRSHINPTGTVLLQLENTMQTSLKDLL

SEQ ID NO: 1051 - DNA, 1194 bp, Artificial Sequence
  variant of human alpha-galactosidase A
ctggataatggattggctagaacacctcctatggggtggcttcactgggagaggttcatgtgcaacctggactgtcaggaagaaccagacagctgcatctccgagaagctctttgaggaaatggccgaacgaatggtgactgacggctggaaagatgcaggttacgagtatctgtgtattgacgattgctggatggccccacaacgggattctgagggaagacttcaggctgatccgcagcgcttccctcatggcataaggcagctggcaaaccacgtccacagtaaggggctcaaattgggaatctacgcggacgtgggcaataagacctgtgccggttttccgggatcattcgggtattatgacattgacgcccaaacgtttgctgattggggcgttgacctgctgaaattcgatggttgctactgtgacagcctcgaaaacctggcagacggctacaagcatatgtctctcgccctgaataaaaccggtcggccaatcgtatattcctgcgagtggcctctttacatgtggccatttcagaaaccgaactacacagaaattcgccagtattgcaatcattggaggaacttcgctgatatcgatgactcatgggcctccataaagagcatcttggactggaccagtcggaatcaggagcgaattgtggatgtcgcaggccctggaggatggaacgatccagacatgctggtgatcggcaattttggcctctcttgggaccagcaggttacccaaatggctctgtgggcaattatggccggtcctcttttcatgagcaacgatctgcgcgcgatctcaccacaggcaaaggccctgctccaagacaaagatgtgatagccatcaatcaggacccgttgggaaagcagggctaccagctgagaaaaggcgacaactttgaggtctgggaaaggcctttgagtggagatgcgtgggctgtggccattattaatcggcaagagatcggaggtccacgcggttatacaattcctcttgcatctcttggcaagggcgttgcctgtaacccagcttgcttcatcactcagcttctgccggtgaagagaaaactgggtttctacgaagctaccagcaggctccgatcccacatcaaccctacaggaaccgtcctcttgcagctggagaatacgatgcagacttcactgaaggacctcctg

SEQ ID NO: 1052 - protein, 398 aa, Artificial Sequence
  variant of human alpha-galactosidase A
LDNGLARTPPMGWLHWERFMCNLDCQEEPDSCISEKLFEEMAERMVTDGWKDAGYEYLCIDDCWMAPQRDSEGRLQADPQRFPHGIRQLANHVHSKGLKLGIYADVGNKTCAGFPGSFGYYDIDAQTFADWGVDLLKFDGCYCDSLENLADGYKHMSLALNKTGRPIVYSCEWPLYMWPFQKPNYTEIRQYCNHWRNFADIDDSWASIKSILDWTSRNQERIVDVAGPGGWNDPDMLVIGNFGLSWDQQVTQMALWAIMAGPLFMSNDLRAISPQAKALLQDKDVIAINQDPLGKQGYQLRKGDNFEVWERPLSGDAWAVAIINRQEIGGPRGYTIPLASLGKGVACNPACFITQLLPVKRKLGFYEATSRLRSHINPTGTVLLQLENTMQTSLKDLL

SEQ ID NO: 1053 - DNA, 1194 bp, Artificial Sequence
  variant of human alpha-galactosidase A
ctggataatggattggctagaacacctcctatggggtggcttcactgggagaggttcatgtgcaacctggactgtcaggaagaaccagacagctgcatctccgagaagctctttgaggaaatggccgaacgaatggtgactgacggctggaaagatgcaggttacgagtatctgtgtattgacgattgctggatggccccacaacgggattctgagggaagacttcaggctgatccgcagcgcttccctcatggcataaggcagctggcaaaccacgtccacagtaaggggctcaaattgggaatctacgcggacgtgggcaataagacctgtgccggttttccgggatcattcgggtattatgacattgacgcccaaacgtttgctgattggggcgttgacctgctgaaattcgatggttgctactgtgacagcctcgaaaacctggcagacggctacaagcatatgtctctcgccctgaataaaaccggtcggccaatcgtatattcctgcgagtggcctctttacatgtggccatttcagaaaccgaactacacagaaattcgccagtattgcaatcattggaggaacttcgctgatatcgatgactcatgggcctccataaagagcatcttggactggaccagtcggaatcaggagcgaattgtggatgtcgcaggccctggaggatggaacgatccagacatgctggtgatcggcaattttggcctctcttgggaccagcaggttacccaaatggctctgtgggcaattatggccggtcctcttttcatgagcaacgatctgcgcgcgatctcaccacaggcaaaggccctgctccaagacaaagatgtgatagccatcaatcaggacccgttgggaaagcagggctaccagctgagaaaaggcgacaactttgaggtctgggaaaggcctttgagtggagatgcgtgggctgtggccattattaatcggcaagagatcggaggtccacgcggttatacaattcctgtagcatctcttggcaagggcgttgcctgtaacccagcttgcttcatcactcagcttctgccgtttaagagaaaactgggtttctacgaagctaccagcaggctccgatcccacatcaaccctacaggaaccgtcctcttgcagctggagaatacgatgcagacttcactgaaggacctcctg

SEQ ID NO: 1054 - protein, 398 aa, Artificial Sequence
  variant of human alpha-galactosidase A
LDNGLARTPPMGWLHWERFMCNLDCQEEPDSCISEKLFEEMAERMVTDGWKDAGYEYLCIDDCWMAPQRDSEGRLQADPQRFPHGIRQLANHVHSKGLKLGIYADVGNKTCAGFPGSFGYYDIDAQTFADWGVDLLKFDGCYCDSLENLADGYKHMSLALNKTGRPIVYSCEWPLYMWPFQKPNYTEIRQYCNHWRNFADIDDSWASIKSILDWTSRNQERIVDVAGPGGWNDPDMLVIGNFGLSWDQQVTQMALWAIMAGPLFMSNDLRAISPQAKALLQDKDVIAINQDPLGKQGYQLRKGDNFEVWERPLSGDAWAVAIINRQEIGGPRGYTIPVASLGKGVACNPACFITQLLPFKRKLGFYEATSRLRSHINPTGTVLLQLENTMQTSLKDLL

SEQ ID NO: 1055 - DNA, 1194 bp, Artificial Sequence
  variant of human alpha-galactosidase A
ctggataatggattggctagaacacctcctatggggtggcttcactgggagaggttcatgtgcaacctggactgtcaggaagaaccagacagctgcatctccgagaagctctttgaggaaatggccgaacgaatggtgactgacggctggaaagatgcaggttacgagtatctgtgtattgacgattgctggatggccccacaacgggattctgagggaagacttcaggctgatccgcagcgcttccctcatggcataaggcagctggcaaaccacgtccacagtaaggggctcaaattgggaatctacgcggacgtgggcaataagacctgtgccggttttccgggatcattcgggtattatgacattgacgcccaaacgtttgctgattggggcgttgacctgctgaaattcgatggttgctactgtgacagcctcgaaaacctggcagacggctacaagcatatgtctctcgccctgaataaaaccggtcggccaatcgtatattcctgcgagtggcctctttacatgtggccatttcagaaaccgaactacacagaaattcgccagtattgcaatcattggaggaacttcgctgatatcgatgactcatgggcctccataaagagcatcttggactggaccagtcggaatcaggagcgaattgtggatgtcgcaggccctggaggatggaacgatccagacatgctggtgatcggcaattttggcctctcttgggaccagcaggttacccaaatggctctgtgggcaattatggccggtcctcttttcatgagcaacgatctgcgcgcgatctcaccacaggcaaaggccctgctccaagacaaagatgtgatagccatcaatcaggacccgttgggaaagcagggctaccagctgagaaaaggcgacaactttgaggtctgggaaaggcctttgagtggagatgcgtgggctgtggccattattaatcggcaagagatcggaggtccacgcggttatacaattcctgtagcatctcttggcaagggcgttgcctgtaacccagcttgcttcatcactcagcttctgccgctgaagagaaaactgggtttctacgaagctaccagcaggctccgatcccacatcaaccctacaggaaccgtcctcttgcagctggagaatacgatgcagacttcactgaaggacctcctg

SEQ ID NO: 1056 - protein, 398 aa, Artificial Sequence
  variant of human alpha-galactosidase A
LDNGLARTPPMGWLHWERFMCNLDCQEEPDSCISEKLFEEMAERMVTDGWKDAGYEYLCIDDCWMAPQRDSEGRLQADPQRFPHGIRQLANHVHSKGLKLGIYADVGNKTCAGFPGSFGYYDIDAQTFADWGVDLLKFDGCYCDSLENLADGYKHMSLALNKTGRPIVYSCEWPLYMWPFQKPNYTEIRQYCNHWRNFADIDDSWASIKSILDWTSRNQERIVDVAGPGGWNDPDMLVIGNFGLSWDQQVTQMALWAIMAGPLFMSNDLRAISPQAKALLQDKDVIAINQDPLGKQGYQLRKGDNFEVWERPLSGDAWAVAIINRQEIGGPRGYTIPVASLGKGVACNPACFITQLLPLKRKLGFYEATSRLRSHINPTGTVLLQLENTMQTSLKDLL

SEQ ID NO: 1057 - DNA, 1194 bp, Artificial Sequence
  variant of human alpha-galactosidase A
ctggataatggattggctagaacacctcctatggggtggcttcactgggagaggttcatgtgcaacctggactgtcaggaagaaccagacagctgcatctccgagaagctctttgaggaaatggccgaacgaatggtgactgacggctggaaagatgcaggttacgagtatctgtgtattgacgattgctggatggccccacaacgggattctgagggaagacttcaggctgatccgcagcgcttccctcatggcataaggcagctggcaaaccacgtccacagtaaggggctcaaattgggaatctacgcggacgtgggcaataagacctgtgccggttttccgggatcattcgggtattatgacattgacgcccaaacgtttgctgattggggcgttgacctgctgaaattcgatggttgctactgtgacagcctcgaaaacctggcagacggctacaagcatatgtctctcgccctgaataaaaccggtcggccaatcgtatattcctgcgagtggcctctttacatgtggccatttcagaaaccgaactacacagaaattcgccagtattgcaatcattggaggaacttcgctgatatcgatgactcatgggcctccataaagagcatcttggactggaccagtcggaatcaggagcgaattgtggatgtcgcaggccctggaggatggaacgatccagacatgctggtgatcggcaattttggcctctcttgggaccagcaggttacccaaatggctctgtgggcaattatggccggtcctcttttcatgagcaacgatctgcgcgcgatctcaccacaggcaaaggccctgctccaagacaaagatgtgatagccatcaatcaggacccgttgggaaagcagggctaccagctgagaaaaggcgacaactttgaggtctgggaaaggcctttgagtggagatgcgtgggctgtggccattattaatcggcaagagatcggaggtccacgcggttatacaattcctgtagcatctcttggcaagggcgttgcctgtaacccagcttgcttcatcactcagcttctgccgcgtaagagaaaactgggtttctacgaagctaccagcaggctccgatcccacatcaaccctacaggaaccgtcctcttgcagctggagaatacgatgcagacttcactgaaggacctcctg

SEQ ID NO: 1058 - protein, 398 aa, Artificial Sequence
  variant of human alpha-galactosidase A
LDNGLARTPPMGWLHWERFMCNLDCQEEPDSCISEKLFEEMAERMVTDGWKDAGYEYLCIDDCWMAPQRDSEGRLQADPQRFPHGIRQLANHVHSKGLKLGIYADVGNKTCAGFPGSFGYYDIDAQTFADWGVDLLKFDGCYCDSLENLADGYKHMSLALNKTGRPIVYSCEWPLYMWPFQKPNYTEIRQYCNHWRNFADIDDSWASIKSILDWTSRNQERIVDVAGPGGWNDPDMLVIGNFGLSWDQQVTQMALWAIMAGPLFMSNDLRAISPQAKALLQDKDVIAINQDPLGKQGYQLRKGDNFEVWERPLSGDAWAVAIINRQEIGGPRGYTIPVASLGKGVACNPACFITQLLPRKRKLGFYEATSRLRSHINPTGTVLLQLENTMQTSLKDLL

SEQ ID NO: 1059 - DNA, 1194 bp, Artificial Sequence
  variant of human alpha-galactosidase A
ctggataatggattggctagaacacctcctatggggtggcttcactgggagaggttcatgtgcaacctggactgtcaggaagaaccagacagctgcatctccgagaagctctttgaggaaatggccgaacgaatggtgactgacggctggaaagatgcaggttacgagtatctgtgtattgacgattgctggatggccccacaacgggattctgagggaagacttcaggctgatccgcagcgcttccctcatggcataaggcagctggcaaaccacgtccacagtaaggggctcaaattgggaatctacgcggacgtgggcaataagacctgtgccggttttccgggatcattcgggtattatgacattgacgcccaaacgtttgctgattggggcgttgacctgctgaaattcgatggttgctactgtgacagcctcgaaaacctggcagacggctacaagcatatgtctctcgccctgaataaaaccggtcggccaatcgtatattcctgcgagtggcctctttacatgtggccatttcagaaaccgaactacacagaaattcgccagtattgcaatcattggaggaacttcgctgatatcgatgactcatgggcctccataaagagcatcttggactggaccagtcggaatcaggagcgaattgtggatgtcgcaggccctggaggatggaacgatccagacatgctggtgatcggcaattttggcctctcttgggaccagcaggttacccaaatggctctgtgggcaattatggccggtcctcttttcatgagcaacgatctgcgcgcgatctcaccacaggcaaaggccctgctccaagacaaagatgtgatagccatcaatcaggacccgttgggaaagcagggctaccagctgagaaaaggcgacaactttgaggtctgggaaaggcctttgagtggagatgcgtgggctgtggccattattaatcggcaagagatcggaggtccacgcggttatacaattcctgtagcatctcttggcaagggcgttgcctgtaacccagcttgcttcatcactcagcttctgccggtgaagagaaaactgggtttctacgaagctaccagcaggctccgatcccacatcaaccctacaggaaccattctcttgcagctggagaatacgatgcagacttcactgaaggacctcctg

SEQ ID NO: 1060 - protein, 398 aa, Artificial Sequence
  variant of human alpha-galactosidase A
LDNGLARTPPMGWLHWERFMCNLDCQEEPDSCISEKLFEEMAERMVTDGWKDAGYEYLCIDDCWMAPQRDSEGRLQADPQRFPHGIRQLANHVHSKGLKLGIYADVGNKTCAGFPGSFGYYDIDAQTFADWGVDLLKFDGCYCDSLENLADGYKHMSLALNKTGRPIVYSCEWPLYMWPFQKPNYTEIRQYCNHWRNFADIDDSWASIKSILDWTSRNQERIVDVAGPGGWNDPDMLVIGNFGLSWDQQVTQMALWAIMAGPLFMSNDLRAISPQAKALLQDKDVIAINQDPLGKQGYQLRKGDNFEVWERPLSGDAWAVAIINRQEIGGPRGYTIPVASLGKGVACNPACFITQLLPVKRKLGFYEATSRLRSHINPTGTILLQLENTMQTSLKDLL

SEQ ID NO: 1061 - DNA, 1194 bp, Artificial Sequence
  variant of human alpha-galactosidase A
ctggataatggattggctagaacacctcctatggggtggcttcactgggagaggttcatgtgcaacctggactgtcaggaagaaccagacagctgcatctccgagaagctctttgaggaaatggccgaacgaatggtgactgacggctggaaagatgcaggttacgagtatctgtgtattgacgattgctggatggccccacaacgggattctgagggaagacttcaggctgatccgcagcgcttccctcatggcataaggcagctggcaaaccacgtccacagtaaggggctcaaattgggaatctacgcggacgtgggcaataagacctgtgccggttttccgggatcattcgggtattatgacattgacgcccaaacgtttgctgattggggcgttgacctgctgaaattcgatggttgctactgtgacagcctcgaaaacctggcagacggctacaagcatatgtctctcgccctgaataaaaccggtcggccaatcgtatattcctgcgagtggcctctttacatgtggccatttcagaaaccgaactacacagaaattcgccagtattgcaatcattggaggaacttcgctgatatcgatgactcatgggcctccataaagagcatcttggactggaccagtcggaatcaggagcgaattgtggatgtcgcaggccctggaggatggaacgatccagacatgctggtgatcggcaattttggcctctcttgggaccagcaggttacccaaatggctctgtgggcaattatggccggtcctcttttcatgagcaacgatctgcgcgcgatctcaccacaggcaaaggccctgctccaagacaaagatgtgatagccatcaatcaggacccgttgggaaagcagggctaccagctgagaaaaggcgacaactttgaggtctgggaaaggcctttgagtggagatgcgtgggctgtggccattattaatcggcaagagatcggaggtccacgcggttatacaattcctgtagcatctcttggcaagggcgttgcctgtaacccagcttgcttcatcactcagcttctgccggtgaagagaaaactgggtttctacgaagctaccagcaggctccgatcccacatcaaccctacaggaaccattctcttgcagctggagaatacgatgcagacttcactgaaggacctcttt

SEQ ID NO: 1062 - protein, 398 aa, Artificial Sequence
  variant of human alpha-galactosidase A
LDNGLARTPPMGWLHWERFMCNLDCQEEPDSCISEKLFEEMAERMVTDGWKDAGYEYLCIDDCWMAPQRDSEGRLQADPQRFPHGIRQLANHVHSKGLKLGIYADVGNKTCAGFPGSFGYYDIDAQTFADWGVDLLKFDGCYCDSLENLADGYKHMSLALNKTGRPIVYSCEWPLYMWPFQKPNYTEIRQYCNHWRNFADIDDSWASIKSILDWTSRNQERIVDVAGPGGWNDPDMLVIGNFGLSWDQQVTQMALWAIMAGPLFMSNDLRAISPQAKALLQDKDVIAINQDPLGKQGYQLRKGDNFEVWERPLSGDAWAVAIINRQEIGGPRGYTIPVASLGKGVACNPACFITQLLPVKRKLGFYEATSRLRSHINPTGTILLQLENTMQTSLKDLF

SEQ ID NO: 1063 - DNA, 1194 bp, Artificial Sequence
  variant of human alpha-galactosidase A
ctggataatggattggctagaacacctcctatggggtggcttcactgggagaggttcatgtgcaacctggactgtcaggaagaaccagacagctgcatctccgagaagctctttgaggaaatggccgaacgaatggtgactgacggctggaaagatgcaggttacgagtatctgtgtattgacgattgctggatggccccacaacgggattctgagggaagacttcaggctgatccgcagcgcttccctcatggcataaggcagctggcaaaccacgtccacagtaaggggctcaaattgggaatctacgcggacgtgggcaataagacctgtgccggttttccgggatcattcgggtattatgacattgacgcccaaacgtttgctgattggggcgttgacctgctgaaattcgatggttgctactgtgacagcctcgaaaacctggcagacggctacaagcatatgtctctcgccctgaataaaaccggtcggccaatcgtatattcctgcgagtggcctctttacatgtggccatttcagaaaccgaactacacagaaattcgccagtattgcaatcattggaggaacttcgctgatatcgatgactcatgggcctccataaagagcatcttggactggaccagtcggaatcaggagcgaattgtggatgtcgcaggccctggaggatggaacgatccagacatgctggtgatcggcaattttggcctctcttatgaccagcaggttacccaaatggctctgtgggcaattatggccggtcctcttttcatgagcaacgatctgcgcgcgatctcaccacaggcaaaggccctgctccaagacaaagatgtgatagccatcaatcaggacccgttgggaaagcagggctaccagctgagaaaaggcgacaactttgaggtctgggaaaggcctttgagtggagatgcgtgggctgtggccattattaatcggcaagagatcggaggtccacgcggttatacaattcctgtagcatctcttggcaagggcgttgcctgtaacccagcttgcttcatcactcagcttctgccggtgaagagaaaactgggtttctacgaagctaccagcaggctccgatcccacatcaaccctacaggaaccgtcctcttgcagctggagaatacgatgcagacttcactgaaggacctcctg

SEQ ID NO: 1064 - protein, 398 aa, Artificial Sequence
  variant of human alpha-galactosidase A
LDNGLARTPPMGWLHWERFMCNLDCQEEPDSCISEKLFEEMAERMVTDGWKDAGYEYLCIDDCWMAPQRDSEGRLQADPQRFPHGIRQLANHVHSKGLKLGIYADVGNKTCAGFPGSFGYYDIDAQTFADWGVDLLKFDGCYCDSLENLADGYKHMSLALNKTGRPIVYSCEWPLYMWPFQKPNYTEIRQYCNHWRNFADIDDSWASIKSILDWTSRNQERIVDVAGPGGWNDPDMLVIGNFGLSYDQQVTQMALWAIMAGPLFMSNDLRAISPQAKALLQDKDVIAINQDPLGKQGYQLRKGDNFEVWERPLSGDAWAVAIINRQEIGGPRGYTIPVASLGKGVACNPACFITQLLPVKRKLGFYEATSRLRSHINPTGTVLLQLENTMQTSLKDLL

SEQ ID NO: 1065 - DNA, 1194 bp, Artificial Sequence
  variant of human alpha-galactosidase A
ctggataatggattggctagaacacctcctatggggtggcttcactgggagaggttcatgtgcaacctggactgtcaggaagaaccagacagctgcatctccgagaagctctttgaggaaatggccgaacgaatggtgactgacggctggaaagatgcaggttacgagtatctgtgtattgacgattgctggatggccccacaacgggattctgagggaagacttcaggctgatccgcagcgcttccctcatggcataaggcagctggcaaaccacgtccacagtaaggggctcaaattgggaatctacgcggacgtgggcaataagacctgtgccggttttccgggatcattcgggtattatgacattgacgcccaaacgtttgctgattggggcgttgacctgctgaaattcgatggttgctactgtgacagcctcgaaaacctggcagacggctacaagcatatgtctctcgccctgaataaaaccggtcggccaatcgtatattcctgcgagtggcctctttacatgtggccatttcagaaaccgaactacacagaaattcgccagtattgcaatcattggaggaacttcgctgatatcgatgactcatgggcctccataaagagcatcttggactggaccagtcggaatcaggagcgaattgtggatgtcgcaggccctggaggatggaacgatccagacatgctggtgatcggcaattttggcctctcttgggaccagcaggttacccaaatggctctgtgggcaattatggccggtcctcttttcatgagcaacgatctgcgcgcgatctcaccacaggcaaaggccctgctccaagacaaagatgtgatagccatcaatcaggacccgttgggaaagcagggctaccagctgagaaaaggcgacaactttgaggtctgggaaaggcctttgagtggagatgcgtgggctgtggccattattaatcggcaagagatcggaggtccacgcggttgtacaattcctgtagcatctcttggcaagggcgttgcctgtaacccagcttgcttcatcactcagcttctgccggtgaagagaaaactgggtttctacgaagctaccagcaggctccgatcccacatcaaccctacaggaaccgtcctcttgcagctggagaatacgatgcagacttcactgaaggacctcctg

SEQ ID NO: 1066 - protein, 398 aa, Artificial Sequence
  variant of human alpha-galactosidase A
LDNGLARTPPMGWLHWERFMCNLDCQEEPDSCISEKLFEEMAERMVTDGWKDAGYEYLCIDDCWMAPQRDSEGRLQADPQRFPHGIRQLANHVHSKGLKLGIYADVGNKTCAGFPGSFGYYDIDAQTFADWGVDLLKFDGCYCDSLENLADGYKHMSLALNKTGRPIVYSCEWPLYMWPFQKPNYTEIRQYCNHWRNFADIDDSWASIKSILDWTSRNQERIVDVAGPGGWNDPDMLVIGNFGLSWDQQVTQMALWAIMAGPLFMSNDLRAISPQAKALLQDKDVIAINQDPLGKQGYQLRKGDNFEVWERPLSGDAWAVAIINRQEIGGPRGCTIPVASLGKGVACNPACFITQLLPVKRKLGFYEATSRLRSHINPTGTVLLQLENTMQTSLKDLL

SEQ ID NO: 1067 - DNA, 1194 bp, Artificial Sequence
  variant of human alpha-galactosidase A
ctggataatggattggctagaacacctcctatggggtggcttcactgggagaggttcatgtgcaacctggactgtcaggaagaaccagacagctgcatctccgagaagctctttgaggaaatggccgaacgaatggtgactgacggctggaaagatgcaggttacgagtatctgtgtattgacgattgctggatggccccacaacgggattctgagggaagacttcaggctgatccgcagcgcttccctcatggcataaggcagctggcaaaccacgtccacagtaaggggctcaaattgggaatctacgcggacgtgggcaataagacctgtgccggttttccgggatcattcgggtattatgacattgacgcccaaacgtttgctgattggggcgttgacctgctgaaattcgatggttgctactgtgacagcctcgaaaacctggcagacggctacaagcatatgtctctcgccctgaataaaaccggtcggccaatcgtatattcctgcgagtggcctctttacatgtggccatttcagaaaccgaactacacagaaattcgccagtattgcaatcattggaggaacttcgctgatatcgatgactcatgggcctccataaagagcatcttggactggaccagtcggaatcaggagcgaattgtggatgtcgcaggccctggaggatggaacgatccagacatgctggtgatcggcaattttggcctctcttgggaccagcaggttacccaaatggctctgtgggcaattatggccggtcctcttttcatgagcaacgatctgcgcgcgatctcaccacaggcaaaggccctgctccaagacaaagatgtgatagccatcaatcaggacccgttgggaaagcagggctaccagctgagaaaaggcgacaactttgaggtctgggaaaggcctttgagtggagatgcgtgggctgtggccattattaatcggcaagagatcggaggtccacgcggtgtgacaattcctgtagcatctcttggcaagggcgttgcctgtaacccagcttgcttcatcactcagcttctgccggtgaagagaaaactgggtttctacgaagctaccagcaggctccgatcccacatcaaccctacaggaaccgtcctcttgcagctggagaatacgatgcagacttcactgaaggacctcctg

SEQ ID NO: 1068 - protein, 398 aa, Artificial Sequence
  variant of human alpha-galactosidase A
LDNGLARTPPMGWLHWERFMCNLDCQEEPDSCISEKLFEEMAERMVTDGWKDAGYEYLCIDDCWMAPQRDSEGRLQADPQRFPHGIRQLANHVHSKGLKLGIYADVGNKTCAGFPGSFGYYDIDAQTFADWGVDLLKFDGCYCDSLENLADGYKHMSLALNKTGRPIVYSCEWPLYMWPFQKPNYTEIRQYCNHWRNFADIDDSWASIKSILDWTSRNQERIVDVAGPGGWNDPDMLVIGNFGLSWDQQVTQMALWAIMAGPLFMSNDLRAISPQAKALLQDKDVIAINQDPLGKQGYQLRKGDNFEVWERPLSGDAWAVAIINRQEIGGPRGVTIPVASLGKGVACNPACFITQLLPVKRKLGFYEATSRLRSHINPTGTVLLQLENTMQTSLKDLL

SEQ ID NO: 1069 - DNA, 1194 bp, Artificial Sequence
  variant of human alpha-galactosidase A
ctggataatggattggctagaacacctcctatggggtggcttcactgggagaggttcatgtgcaacctggactgtcaggaagaaccagacagctgcatctccgagaagctctttgaggaaatggccgaacgaatggtgactgagggctggaaagatgcaggttacgagtatctgtgtattgacgattgctggatggccccacaacgggattctgagggaagacttcaggctgatccgcagcgcttccctcatggcataaggcagctggcaaaccacgtccacagtaaggggctcaaattgggaatctacgcggacgtgggcaataagacctgtgccggttttccgggatcattcgggtattatgacattgacgcccaaacgtttgctgattggggcgttgacctgctgaaattcgatggttgctactgtgacagcctcgaaaacctggcagacggctacaagcatatgtctctcgccctgaatagaaccggtcggccaatcgtatattcctgcgagtggcctctttacatgtggccatttcagaaaccgaactacacagaaattcgccagtattgcaatcattggaggaacttcgctgatatcgatgactcatggtgttccataaagagcatcttggactggaccagtcggaatcaggagcgaattgtggatgtcgcaggccctggaggatggaacgatccagacatgctggtgatcggcaattttggcctctcttgggaccagcaggttacccaaatggctctgtgggcaattatggccggtcctcttttcatgagcaacgatctgcgcgcgatctcaccacaggcaaaggccctgctccaagacaaagatgtgatagccatcaatcaggacccgttgggaaagcagggctaccagctgagaaaaggcgacaactttgaggtctgggaaaggcctttgagtggagatgcgtgggctgtggccattattaatcggcaagagatcggaggtccacgctcctatacaattcctgtagcatctcttggcaagggcgttgcctgtaacccagcttgcttcatcactcagcttctgccggtgaagagaaaactgggtttctacgaagctaccagcaggctccgatcccacatcaaccctacaggaaccgtcctcttgcagctggagaatacgatgcagacttcactgaaggacctcctg

SEQ ID NO: 1070 - protein, 398 aa, Artificial Sequence
  variant of human alpha-galactosidase A
LDNGLARTPPMGWLHWERFMCNLDCQEEPDSCISEKLFEEMAERMVTEGWKDAGYEYLCIDDCWMAPQRDSEGRLQADPQRFPHGIRQLANHVHSKGLKLGIYADVGNKTCAGFPGSFGYYDIDAQTFADWGVDLLKFDGCYCDSLENLADGYKHMSLALNRTGRPIVYSCEWPLYMWPFQKPNYTEIRQYCNHWRNFADIDDSWCSIKSILDWTSRNQERIVDVAGPGGWNDPDMLVIGNFGLSWDQQVTQMALWAIMAGPLFMSNDLRAISPQAKALLQDKDVIAINQDPLGKQGYQLRKGDNFEVWERPLSGDAWAVAIINRQEIGGPRSYTIPVASLGKGVACNPACFITQLLPVKRKLGFYEATSRLRSHINPTGTVLLQLENTMQTSLKDLL

SEQ ID NO: 1071 - DNA, 1194 bp, Artificial Sequence
  variant of human alpha-galactosidase A
ctggataatggattggctagaacacctcctatggggtggcttcactgggagaggttcatgtgcaacctggactgtcaggaagaaccagacagctgcatctccgagaagctctttgaggaaatggccgaacgaatggtgactgagggctggaaagatgcaggttacgagtatctgtgtattgacgattgctggatggccccacaacgggattctgagggaagacttcaggctgatccgcagcgcttccctcatggcataaggcagctggcaaaccacgtccacagtaaggggctcaaattgggaatctacgcggacgtgggcaataagacctgtgccggttttccgggatcattcgggtattatgacattgacgcccaaacgtttgctgattggggcgttgacctgctgaaattcgatggttgctactgtgacagcctcgaaaacctggcagacggctacaagcatatgtctctcgccctgaatagaaccggtcggccaatcgtatattcctgcgagtggcctctttacatgtggccatttcagaaaccgaactacacagaaattcgccagtattgcaatcattggaggaacttcgctgatatcgatgactcatgggattccataaagagcatcttggactggaccagtcggaatcaggagcgaattgtggatgtcgcaggccctggaggatggaacgatccagacatgctggtgatcggcaattttggcctctcttgggaccagcaggttacccaaatggctctgtgggcaattatggccggtcctcttttcatgagcaacgatctgcgcgcgatctcaccacaggcaaaggccctgctccaagacaaagatgtgatagccatcaatcaggacccgttgggaaagcagggctaccagctgagaaaaggcgacaactttgaggtctgggaaaggcctttgagtggagatgcgtgggctgtggccattattaatcggcaagagatcggaggtccacgctcctatacaattcctgtagcatctcttggcaagggcgttgcctgtaacccagcttgcttcatcactcagcttctgccggtgaagagaaaactgggtttctacgaagctaccagcaggctccgatcccacatcaaccctacaggaaccgtcctcttgcagctggagaatacgatgcagacttcactgaaggacctcctg

SEQ ID NO: 1072 - protein, 398 aa, Artificial Sequence
  variant of human alpha-galactosidase A
LDNGLARTPPMGWLHWERFMCNLDCQEEPDSCISEKLFEEMAERMVTEGWKDAGYEYLCIDDCWMAPQRDSEGRLQADPQRFPHGIRQLANHVHSKGLKLGIYADVGNKTCAGFPGSFGYYDIDAQTFADWGVDLLKFDGCYCDSLENLADGYKHMSLALNRTGRPIVYSCEWPLYMWPFQKPNYTEIRQYCNHWRNFADIDDSWDSIKSILDWTSRNQERIVDVAGPGGWNDPDMLVIGNFGLSWDQQVTQMALWAIMAGPLFMSNDLRAISPQAKALLQDKDVIAINQDPLGKQGYQLRKGDNFEVWERPLSGDAWAVAIINRQEIGGPRSYTIPVASLGKGVACNPACFITQLLPVKRKLGFYEATSRLRSHINPTGTVLLQLENTMQTSLKDLL

SEQ ID NO: 1073 - DNA, 1194 bp, Artificial Sequence
  variant of human alpha-galactosidase A
ctggataatggattggctagaacacctcctatggggtggcttcactgggagaggttcatgtgcaacctggactgtcaggaagaaccagacagctgcatctccgagaagctctttgaggaaatggccgaacgaatggtgactgagggctggaaagatgcaggttacgagtatctgtgtattgacgattgctggatggccccacaacgggattctgagggaagacttcaggctgatccgcagcgcttccctcatggcataaggcagctggcaaaccacgtccacagtaaggggctcaaattgggaatctacgcggacgtgggcaataagacctgtgccggttttccgggatcattcgggtattatgacattgacgcccaaacgtttgctgattggggcgttgacctgctgaaattcgatggttgctactgtgacagcctcgaaaacctggcagacggctacaagcatatgtctctcgccctgaatagaaccggtcggccaatcgtatattcctgcgagtggcctctttacatgtggccatttcagaaaccgaactacacagaaattcgccagtattgcaatcattggaggaacttcgctgatatcgatgactcatgggaatccataaagagcatcttggactggaccagtcggaatcaggagcgaattgtggatgtcgcaggccctggaggatggaacgatccagacatgctggtgatcggcaattttggcctctcttgggaccagcaggttacccaaatggctctgtgggcaattatggccggtcctcttttcatgagcaacgatctgcgcgcgatctcaccacaggcaaaggccctgctccaagacaaagatgtgatagccatcaatcaggacccgttgggaaagcagggctaccagctgagaaaaggcgacaactttgaggtctgggaaaggcctttgagtggagatgcgtgggctgtggccattattaatcggcaagagatcggaggtccacgctcctatacaattcctgtagcatctcttggcaagggcgttgcctgtaacccagcttgcttcatcactcagcttctgccggtgaagagaaaactgggtttctacgaagctaccagcaggctccgatcccacatcaaccctacaggaaccgtcctcttgcagctggagaatacgatgcagacttcactgaaggacctcctg

SEQ ID NO: 1074 - protein, 398 aa, Artificial Sequence
  variant of human alpha-galactosidase A
LDNGLARTPPMGWLHWERFMCNLDCQEEPDSCISEKLFEEMAERMVTEGWKDAGYEYLCIDDCWMAPQRDSEGRLQADPQRFPHGIRQLANHVHSKGLKLGIYADVGNKTCAGFPGSFGYYDIDAQTFADWGVDLLKFDGCYCDSLENLADGYKHMSLALNRTGRPIVYSCEWPLYMWPFQKPNYTEIRQYCNHWRNFADIDDSWESIKSILDWTSRNQERIVDVAGPGGWNDPDMLVIGNFGLSWDQQVTQMALWAIMAGPLFMSNDLRAISPQAKALLQDKDVIAINQDPLGKQGYQLRKGDNFEVWERPLSGDAWAVAIINRQEIGGPRSYTIPVASLGKGVACNPACFITQLLPVKRKLGFYEATSRLRSHINPTGTVLLQLENTMQTSLKDLL

SEQ ID NO: 1075 - DNA, 1194 bp, Artificial Sequence
  variant of human alpha-galactosidase A
ctggataatggattggctagaacacctcctatggggtggcttcactgggagaggttcatgtgcaacctggactgtcaggaagaaccagacagctgcatctccgagaagctctttgaggaaatggccgaacgaatggtgactgagggctggaaagatgcaggttacgagtatctgtgtattgacgattgctggatggccccacaacgggattctgagggaagacttcaggctgatccgcagcgcttccctcatggcataaggcagctggcaaaccacgtccacagtaaggggctcaaattgggaatctacgcggacgtgggcaataagacctgtgccggttttccgggatcattcgggtattatgacattgacgcccaaacgtttgctgattggggcgttgacctgctgaaattcgatggttgctactgtgacagcctcgaaaacctggcagacggctacaagcatatgtctctcgccctgaatagaaccggtcggccaatcgtatattcctgcgagtggcctctttacatgtggccatttcagaaaccgaactacacagaaattcgccagtattgcaatcattggaggaacttcgctgatatcgatgactcatggttttccataaagagcatcttggactggaccagtcggaatcaggagcgaattgtggatgtcgcaggccctggaggatggaacgatccagacatgctggtgatcggcaattttggcctctcttgggaccagcaggttacccaaatggctctgtgggcaattatggccggtcctcttttcatgagcaacgatctgcgcgcgatctcaccacaggcaaaggccctgctccaagacaaagatgtgatagccatcaatcaggacccgttgggaaagcagggctaccagctgagaaaaggcgacaactttgaggtctgggaaaggcctttgagtggagatgcgtgggctgtggccattattaatcggcaagagatcggaggtccacgctcctatacaattcctgtagcatctcttggcaagggcgttgcctgtaacccagcttgcttcatcactcagcttctgccggtgaagagaaaactgggtttctacgaagctaccagcaggctccgatcccacatcaaccctacaggaaccgtcctcttgcagctggagaatacgatgcagacttcactgaaggacctcctg

SEQ ID NO: 1076 - protein, 398 aa, Artificial Sequence
  variant of human alpha-galactosidase A
LDNGLARTPPMGWLHWERFMCNLDCQEEPDSCISEKLFEEMAERMVTEGWKDAGYEYLCIDDCWMAPQRDSEGRLQADPQRFPHGIRQLANHVHSKGLKLGIYADVGNKTCAGFPGSFGYYDIDAQTFADWGVDLLKFDGCYCDSLENLADGYKHMSLALNRTGRPIVYSCEWPLYMWPFQKPNYTEIRQYCNHWRNFADIDDSWFSIKSILDWTSRNQERIVDVAGPGGWNDPDMLVIGNFGLSWDQQVTQMALWAIMAGPLFMSNDLRAISPQAKALLQDKDVIAINQDPLGKQGYQLRKGDNFEVWERPLSGDAWAVAIINRQEIGGPRSYTIPVASLGKGVACNPACFITQLLPVKRKLGFYEATSRLRSHINPTGTVLLQLENTMQTSLKDLL

SEQ ID NO: 1077 - DNA, 1194 bp, Artificial Sequence
  variant of human alpha-galactosidase A
ctggataatggattggctagaacacctcctatggggtggcttcactgggagaggttcatgtgcaacctggactgtcaggaagaaccagacagctgcatctccgagaagctctttgaggaaatggccgaacgaatggtgactgagggctggaaagatgcaggttacgagtatctgtgtattgacgattgctggatggccccacaacgggattctgagggaagacttcaggctgatccgcagcgcttccctcatggcataaggcagctggcaaaccacgtccacagtaaggggctcaaattgggaatctacgcggacgtgggcaataagacctgtgccggttttccgggatcattcgggtattatgacattgacgcccaaacgtttgctgattggggcgttgacctgctgaaattcgatggttgctactgtgacagcctcgaaaacctggcagacggctacaagcatatgtctctcgccctgaatagaaccggtcggccaatcgtatattcctgcgagtggcctctttacatgtggccatttcagaaaccgaactacacagaaattcgccagtattgcaatcattggaggaacttcgctgatatcgatgactcatgggggtccataaagagcatcttggactggaccagtcggaatcaggagcgaattgtggatgtcgcaggccctggaggatggaacgatccagacatgctggtgatcggcaattttggcctctcttgggaccagcaggttacccaaatggctctgtgggcaattatggccggtcctcttttcatgagcaacgatctgcgcgcgatctcaccacaggcaaaggccctgctccaagacaaagatgtgatagccatcaatcaggacccgttgggaaagcagggctaccagctgagaaaaggcgacaactttgaggtctgggaaaggcctttgagtggagatgcgtgggctgtggccattattaatcggcaagagatcggaggtccacgctcctatacaattcctgtagcatctcttggcaagggcgttgcctgtaacccagcttgcttcatcactcagcttctgccggtgaagagaaaactgggtttctacgaagctaccagcaggctccgatcccacatcaaccctacaggaaccgtcctcttgcagctggagaatacgatgcagacttcactgaaggacctcctg

SEQ ID NO: 1078 - protein, 398 aa, Artificial Sequence
  variant of human alpha-galactosidase A
LDNGLARTPPMGWLHWERFMCNLDCQEEPDSCISEKLFEEMAERMVTEGWKDAGYEYLCIDDCWMAPQRDSEGRLQADPQRFPHGIRQLANHVHSKGLKLGIYADVGNKTCAGFPGSFGYYDIDAQTFADWGVDLLKFDGCYCDSLENLADGYKHMSLALNRTGRPIVYSCEWPLYMWPFQKPNYTEIRQYCNHWRNFADIDDSWGSIKSILDWTSRNQERIVDVAGPGGWNDPDMLVIGNFGLSWDQQVTQMALWAIMAGPLFMSNDLRAISPQAKALLQDKDVIAINQDPLGKQGYQLRKGDNFEVWERPLSGDAWAVAIINRQEIGGPRSYTIPVASLGKGVACNPACFITQLLPVKRKLGFYEATSRLRSHINPTGTVLLQLENTMQTSLKDLL

SEQ ID NO: 1079 - DNA, 1194 bp, Artificial Sequence
  variant of human alpha-galactosidase A
ctggataatggattggctagaacacctcctatggggtggcttcactgggagaggttcatgtgcaacctggactgtcaggaagaaccagacagctgcatctccgagaagctctttgaggaaatggccgaacgaatggtgactgagggctggaaagatgcaggttacgagtatctgtgtattgacgattgctggatggccccacaacgggattctgagggaagacttcaggctgatccgcagcgcttccctcatggcataaggcagctggcaaaccacgtccacagtaaggggctcaaattgggaatctacgcggacgtgggcaataagacctgtgccggttttccgggatcattcgggtattatgacattgacgcccaaacgtttgctgattggggcgttgacctgctgaaattcgatggttgctactgtgacagcctcgaaaacctggcagacggctacaagcatatgtctctcgccctgaatagaaccggtcggccaatcgtatattcctgcgagtggcctctttacatgtggccatttcagaaaccgaactacacagaaattcgccagtattgcaatcattggaggaacttcgctgatatcgatgactcatggcattccataaagagcatcttggactggaccagtcggaatcaggagcgaattgtggatgtcgcaggccctggaggatggaacgatccagacatgctggtgatcggcaattttggcctctcttgggaccagcaggttacccaaatggctctgtgggcaattatggccggtcctcttttcatgagcaacgatctgcgcgcgatctcaccacaggcaaaggccctgctccaagacaaagatgtgatagccatcaatcaggacccgttgggaaagcagggctaccagctgagaaaaggcgacaactttgaggtctgggaaaggcctttgagtggagatgcgtgggctgtggccattattaatcggcaagagatcggaggtccacgctcctatacaattcctgtagcatctcttggcaagggcgttgcctgtaacccagcttgcttcatcactcagcttctgccggtgaagagaaaactgggtttctacgaagctaccagcaggctccgatcccacatcaaccctacaggaaccgtcctcttgcagctggagaatacgatgcagacttcactgaaggacctcctg

SEQ ID NO: 1080 - protein, 398 aa, Artificial Sequence
  variant of human alpha-galactosidase A
LDNGLARTPPMGWLHWERFMCNLDCQEEPDSCISEKLFEEMAERMVTEGWKDAGYEYLCIDDCWMAPQRDSEGRLQADPQRFPHGIRQLANHVHSKGLKLGIYADVGNKTCAGFPGSFGYYDIDAQTFADWGVDLLKFDGCYCDSLENLADGYKHMSLALNRTGRPIVYSCEWPLYMWPFQKPNYTEIRQYCNHWRNFADIDDSWHSIKSILDWTSRNQERIVDVAGPGGWNDPDMLVIGNFGLSWDQQVTQMALWAIMAGPLFMSNDLRAISPQAKALLQDKDVIAINQDPLGKQGYQLRKGDNFEVWERPLSGDAWAVAIINRQEIGGPRSYTIPVASLGKGVACNPACFITQLLPVKRKLGFYEATSRLRSHINPTGTVLLQLENTMQTSLKDLL

SEQ ID NO: 1081 - DNA, 1194 bp, Artificial Sequence
  variant of human alpha-galactosidase A
ctggataatggattggctagaacacctcctatggggtggcttcactgggagaggttcatgtgcaacctggactgtcaggaagaaccagacagctgcatctccgagaagctctttgaggaaatggccgaacgaatggtgactgagggctggaaagatgcaggttacgagtatctgtgtattgacgattgctggatggccccacaacgggattctgagggaagacttcaggctgatccgcagcgcttccctcatggcataaggcagctggcaaaccacgtccacagtaaggggctcaaattgggaatctacgcggacgtgggcaataagacctgtgccggttttccgggatcattcgggtattatgacattgacgcccaaacgtttgctgattggggcgttgacctgctgaaattcgatggttgctactgtgacagcctcgaaaacctggcagacggctacaagcatatgtctctcgccctgaatagaaccggtcggccaatcgtatattcctgcgagtggcctctttacatgtggccatttcagaaaccgaactacacagaaattcgccagtattgcaatcattggaggaacttcgctgatatcgatgactcatggatctccataaagagcatcttggactggaccagtcggaatcaggagcgaattgtggatgtcgcaggccctggaggatggaacgatccagacatgctggtgatcggcaattttggcctctcttgggaccagcaggttacccaaatggctctgtgggcaattatggccggtcctcttttcatgagcaacgatctgcgcgcgatctcaccacaggcaaaggccctgctccaagacaaagatgtgatagccatcaatcaggacccgttgggaaagcagggctaccagctgagaaaaggcgacaactttgaggtctgggaaaggcctttgagtggagatgcgtgggctgtggccattattaatcggcaagagatcggaggtccacgctcctatacaattcctgtagcatctcttggcaagggcgttgcctgtaacccagcttgcttcatcactcagcttctgccggtgaagagaaaactgggtttctacgaagctaccagcaggctccgatcccacatcaaccctacaggaaccgtcctcttgcagctggagaatacgatgcagacttcactgaaggacctcctg

SEQ ID NO: 1082 - protein, 398 aa, Artificial Sequence
  variant of human alpha-galactosidase A
LDNGLARTPPMGWLHWERFMCNLDCQEEPDSCISEKLFEEMAERMVTEGWKDAGYEYLCIDDCWMAPQRDSEGRLQADPQRFPHGIRQLANHVHSKGLKLGIYADVGNKTCAGFPGSFGYYDIDAQTFADWGVDLLKFDGCYCDSLENLADGYKHMSLALNRTGRPIVYSCEWPLYMWPFQKPNYTEIRQYCNHWRNFADIDDSWISIKSILDWTSRNQERIVDVAGPGGWNDPDMLVIGNFGLSWDQQVTQMALWAIMAGPLFMSNDLRAISPQAKALLQDKDVIAINQDPLGKQGYQLRKGDNFEVWERPLSGDAWAVAIINRQEIGGPRSYTIPVASLGKGVACNPACFITQLLPVKRKLGFYEATSRLRSHINPTGTVLLQLENTMQTSLKDLL

SEQ ID NO: 1083 - DNA, 1194 bp, Artificial Sequence
  variant of human alpha-galactosidase A
ctggataatggattggctagaacacctcctatggggtggcttcactgggagaggttcatgtgcaacctggactgtcaggaagaaccagacagctgcatctccgagaagctctttgaggaaatggccgaacgaatggtgactgagggctggaaagatgcaggttacgagtatctgtgtattgacgattgctggatggccccacaacgggattctgagggaagacttcaggctgatccgcagcgcttccctcatggcataaggcagctggcaaaccacgtccacagtaaggggctcaaattgggaatctacgcggacgtgggcaataagacctgtgccggttttccgggatcattcgggtattatgacattgacgcccaaacgtttgctgattggggcgttgacctgctgaaattcgatggttgctactgtgacagcctcgaaaacctggcagacggctacaagcatatgtctctcgccctgaatagaaccggtcggccaatcgtatattcctgcgagtggcctctttacatgtggccatttcagaaaccgaactacacagaaattcgccagtattgcaatcattggaggaacttcgctgatatcgatgactcatggaaatccataaagagcatcttggactggaccagtcggaatcaggagcgaattgtggatgtcgcaggccctggaggatggaacgatccagacatgctggtgatcggcaattttggcctctcttgggaccagcaggttacccaaatggctctgtgggcaattatggccggtcctcttttcatgagcaacgatctgcgcgcgatctcaccacaggcaaaggccctgctccaagacaaagatgtgatagccatcaatcaggacccgttgggaaagcagggctaccagctgagaaaaggcgacaactttgaggtctgggaaaggcctttgagtggagatgcgtgggctgtggccattattaatcggcaagagatcggaggtccacgctcctatacaattcctgtagcatctcttggcaagggcgttgcctgtaacccagcttgcttcatcactcagcttctgccggtgaagagaaaactgggtttctacgaagctaccagcaggctccgatcccacatcaaccctacaggaaccgtcctcttgcagctggagaatacgatgcagacttcactgaaggacctcctg

SEQ ID NO: 1084 - protein, 398 aa, Artificial Sequence; identical to SEQ ID NO: 204
  variant of human alpha-galactosidase A

SEQ ID NO: 1085 - DNA, 1194 bp, Artificial Sequence
  variant of human alpha-galactosidase A
ctggataatggattggctagaacacctcctatggggtggcttcactgggagaggttcatgtgcaacctggactgtcaggaagaaccagacagctgcatctccgagaagctctttgaggaaatggccgaacgaatggtgactgagggctggaaagatgcaggttacgagtatctgtgtattgacgattgctggatggccccacaacgggattctgagggaagacttcaggctgatccgcagcgcttccctcatggcataaggcagctggcaaaccacgtccacagtaaggggctcaaattgggaatctacgcggacgtgggcaataagacctgtgccggttttccgggatcattcgggtattatgacattgacgcccaaacgtttgctgattggggcgttgacctgctgaaattcgatggttgctactgtgacagcctcgaaaacctggcagacggctacaagcatatgtctctcgccctgaatagaaccggtcggccaatcgtatattcctgcgagtggcctctttacatgtggccatttcagaaaccgaactacacagaaattcgccagtattgcaatcattggaggaacttcgctgatatcgatgactcatggctgtccataaagagcatcttggactggaccagtcggaatcaggagcgaattgtggatgtcgcaggccctggaggatggaacgatccagacatgctggtgatcggcaattttggcctctcttgggaccagcaggttacccaaatggctctgtgggcaattatggccggtcctcttttcatgagcaacgatctgcgcgcgatctcaccacaggcaaaggccctgctccaagacaaagatgtgatagccatcaatcaggacccgttgggaaagcagggctaccagctgagaaaaggcgacaactttgaggtctgggaaaggcctttgagtggagatgcgtgggctgtggccattattaatcggcaagagatcggaggtccacgctcctatacaattcctgtagcatctcttggcaagggcgttgcctgtaacccagcttgcttcatcactcagcttctgccggtgaagagaaaactgggtttctacgaagctaccagcaggctccgatcccacatcaaccctacaggaaccgtcctcttgcagctggagaatacgatgcagacttcactgaaggacctcctg

SEQ ID NO: 1086 - protein, 398 aa, Artificial Sequence
  variant of human alpha-galactosidase A
LDNGLARTPPMGWLHWERFMCNLDCQEEPDSCISEKLFEEMAERMVTEGWKDAGYEYLCIDDCWMAPQRDSEGRLQADPQRFPHGIRQLANHVHSKGLKLGIYADVGNKTCAGFPGSFGYYDIDAQTFADWGVDLLKFDGCYCDSLENLADGYKHMSLALNRTGRPIVYSCEWPLYMWPFQKPNYTEIRQYCNHWRNFADIDDSWLSIKSILDWTSRNQERIVDVAGPGGWNDPDMLVIGNFGLSWDQQVTQMALWAIMAGPLFMSNDLRAISPQAKALLQDKDVIAINQDPLGKQGYQLRKGDNFEVWERPLSGDAWAVAIINRQEIGGPRSYTIPVASLGKGVACNPACFITQLLPVKRKLGFYEATSRLRSHINPTGTVLLQLENTMQTSLKDLL

SEQ ID NO: 1087 - DNA, 1194 bp, Artificial Sequence
  variant of human alpha-galactosidase A
ctggataatggattggctagaacacctcctatggggtggcttcactgggagaggttcatgtgcaacctggactgtcaggaagaaccagacagctgcatctccgagaagctctttgaggaaatggccgaacgaatggtgactgagggctggaaagatgcaggttacgagtatctgtgtattgacgattgctggatggccccacaacgggattctgagggaagacttcaggctgatccgcagcgcttccctcatggcataaggcagctggcaaaccacgtccacagtaaggggctcaaattgggaatctacgcggacgtgggcaataagacctgtgccggttttccgggatcattcgggtattatgacattgacgcccaaacgtttgctgattggggcgttgacctgctgaaattcgatggttgctactgtgacagcctcgaaaacctggcagacggctacaagcatatgtctctcgccctgaatagaaccggtcggccaatcgtatattcctgcgagtggcctctttacatgtggccatttcagaaaccgaactacacagaaattcgccagtattgcaatcattggaggaacttcgctgatatcgatgactcatggatgtccataaagagcatcttggactggaccagtcggaatcaggagcgaattgtggatgtcgcaggccctggaggatggaacgatccagacatgctggtgatcggcaattttggcctctcttgggaccagcaggttacccaaatggctctgtgggcaattatggccggtcctcttttcatgagcaacgatctgcgcgcgatctcaccacaggcaaaggccctgctccaagacaaagatgtgatagccatcaatcaggacccgttgggaaagcagggctaccagctgagaaaaggcgacaactttgaggtctgggaaaggcctttgagtggagatgcgtgggctgtggccattattaatcggcaagagatcggaggtccacgctcctatacaattcctgtagcatctcttggcaagggcgttgcctgtaacccagcttgcttcatcactcagcttctgccggtgaagagaaaactgggtttctacgaagctaccagcaggctccgatcccacatcaaccctacaggaaccgtcctcttgcagctggagaatacgatgcagacttcactgaaggacctcctg

SEQ ID NO: 1088 - protein, 398 aa, Artificial Sequence
  variant of human alpha-galactosidase A
LDNGLARTPPMGWLHWERFMCNLDCQEEPDSCISEKLFEEMAERMVTEGWKDAGYEYLCIDDCWMAPQRDSEGRLQADPQRFPHGIRQLANHVHSKGLKLGIYADVGNKTCAGFPGSFGYYDIDAQTFADWGVDLLKFDGCYCDSLENLADGYKHMSLALNRTGRPIVYSCEWPLYMWPFQKPNYTEIRQYCNHWRNFADIDDSWMSIKSILDWTSRNQERIVDVAGPGGWNDPDMLVIGNFGLSWDQQVTQMALWAIMAGPLFMSNDLRAISPQAKALLQDKDVIAINQDPLGKQGYQLRKGDNFEVWERPLSGDAWAVAIINRQEIGGPRSYTIPVASLGKGVACNPACFITQLLPVKRKLGFYEATSRLRSHINPTGTVLLQLENTMQTSLKDLL

SEQ ID NO: 1089 - DNA, 1194 bp, Artificial Sequence
  variant of human alpha-galactosidase A
ctggataatggattggctagaacacctcctatggggtggcttcactgggagaggttcatgtgcaacctggactgtcaggaagaaccagacagctgcatctccgagaagctctttgaggaaatggccgaacgaatggtgactgagggctggaaagatgcaggttacgagtatctgtgtattgacgattgctggatggccccacaacgggattctgagggaagacttcaggctgatccgcagcgcttccctcatggcataaggcagctggcaaaccacgtccacagtaaggggctcaaattgggaatctacgcggacgtgggcaataagacctgtgccggttttccgggatcattcgggtattatgacattgacgcccaaacgtttgctgattggggcgttgacctgctgaaattcgatggttgctactgtgacagcctcgaaaacctggcagacggctacaagcatatgtctctcgccctgaatagaaccggtcggccaatcgtatattcctgcgagtggcctctttacatgtggccatttcagaaaccgaactacacagaaattcgccagtattgcaatcattggaggaacttcgctgatatcgatgactcatggaattccataaagagcatcttggactggaccagtcggaatcaggagcgaattgtggatgtcgcaggccctggaggatggaacgatccagacatgctggtgatcggcaattttggcctctcttgggaccagcaggttacccaaatggctctgtgggcaattatggccggtcctcttttcatgagcaacgatctgcgcgcgatctcaccacaggcaaaggccctgctccaagacaaagatgtgatagccatcaatcaggacccgttgggaaagcagggctaccagctgagaaaaggcgacaactttgaggtctgggaaaggcctttgagtggagatgcgtgggctgtggccattattaatcggcaagagatcggaggtccacgctcctatacaattcctgtagcatctcttggcaagggcgttgcctgtaacccagcttgcttcatcactcagcttctgccggtgaagagaaaactgggtttctacgaagctaccagcaggctccgatcccacatcaaccctacaggaaccgtcctcttgcagctggagaatacgatgcagacttcactgaaggacctcctg

SEQ ID NO: 1090 - protein, 398 aa, Artificial Sequence
  variant of human alpha-galactosidase A
LDNGLARTPPMGWLHWERFMCNLDCQEEPDSCISEKLFEEMAERMVTEGWKDAGYEYLCIDDCWMAPQRDSEGRLQADPQRFPHGIRQLANHVHSKGLKLGIYADVGNKTCAGFPGSFGYYDIDAQTFADWGVDLLKFDGCYCDSLENLADGYKHMSLALNRTGRPIVYSCEWPLYMWPFQKPNYTEIRQYCNHWRNFADIDDSWNSIKSILDWTSRNQERIVDVAGPGGWNDPDMLVIGNFGLSWDQQVTQMALWAIMAGPLFMSNDLRAISPQAKALLQDKDVIAINQDPLGKQGYQLRKGDNFEVWERPLSGDAWAVAIINRQEIGGPRSYTIPVASLGKGVACNPACFITQLLPVKRKLGFYEATSRLRSHINPTGTVLLQLENTMQTSLKDLL

SEQ ID NO: 1091 - DNA, 1194 bp, Artificial Sequence
  variant of human alpha-galactosidase A
ctggataatggattggctagaacacctcctatggggtggcttcactgggagaggttcatgtgcaacctggactgtcaggaagaaccagacagctgcatctccgagaagctctttgaggaaatggccgaacgaatggtgactgagggctggaaagatgcaggttacgagtatctgtgtattgacgattgctggatggccccacaacgggattctgagggaagacttcaggctgatccgcagcgcttccctcatggcataaggcagctggcaaaccacgtccacagtaaggggctcaaattgggaatctacgcggacgtgggcaataagacctgtgccggttttccgggatcattcgggtattatgacattgacgcccaaacgtttgctgattggggcgttgacctgctgaaattcgatggttgctactgtgacagcctcgaaaacctggcagacggctacaagcatatgtctctcgccctgaatagaaccggtcggccaatcgtatattcctgcgagtggcctctttacatgtggccatttcagaaaccgaactacacagaaattcgccagtattgcaatcattggaggaacttcgctgatatcgatgactcatggccatccataaagagcatcttggactggaccagtcggaatcaggagcgaattgtggatgtcgcaggccctggaggatggaacgatccagacatgctggtgatcggcaattttggcctctcttgggaccagcaggttacccaaatggctctgtgggcaattatggccggtcctcttttcatgagcaacgatctgcgcgcgatctcaccacaggcaaaggccctgctccaagacaaagatgtgatagccatcaatcaggacccgttgggaaagcagggctaccagctgagaaaaggcgacaactttgaggtctgggaaaggcctttgagtggagatgcgtgggctgtggccattattaatcggcaagagatcggaggtccacgctcctatacaattcctgtagcatctcttggcaagggcgttgcctgtaacccagcttgcttcatcactcagcttctgccggtgaagagaaaactgggtttctacgaagctaccagcaggctccgatcccacatcaaccctacaggaaccgtcctcttgcagctggagaatacgatgcagacttcactgaaggacctcctg

SEQ ID NO: 1092 - protein, 398 aa, Artificial Sequence
  variant of human alpha-galactosidase A
LDNGLARTPPMGWLHWERFMCNLDCQEEPDSCISEKLFEEMAERMVTEGWKDAGYEYLCIDDCWMAPQRDSEGRLQADPQRFPHGIRQLANHVHSKGLKLGIYADVGNKTCAGFPGSFGYYDIDAQTFADWGVDLLKFDGCYCDSLENLADGYKHMSLALNRTGRPIVYSCEWPLYMWPFQKPNYTEIRQYCNHWRNFADIDDSWPSIKSILDWTSRNQERIVDVAGPGGWNDPDMLVIGNFGLSWDQQVTQMALWAIMAGPLFMSNDLRAISPQAKALLQDKDVIAINQDPLGKQGYQLRKGDNFEVWERPLSGDAWAVAIINRQEIGGPRSYTIPVASLGKGVACNPACFITQLLPVKRKLGFYEATSRLRSHINPTGTVLLQLENTMQTSLKDLL

SEQ ID NO: 1093 - DNA, 1194 bp, Artificial Sequence
  variant of human alpha-galactosidase A
ctggataatggattggctagaacacctcctatggggtggcttcactgggagaggttcatgtgcaacctggactgtcaggaagaaccagacagctgcatctccgagaagctctttgaggaaatggccgaacgaatggtgactgagggctggaaagatgcaggttacgagtatctgtgtattgacgattgctggatggccccacaacgggattctgagggaagacttcaggctgatccgcagcgcttccctcatggcataaggcagctggcaaaccacgtccacagtaaggggctcaaattgggaatctacgcggacgtgggcaataagacctgtgccggttttccgggatcattcgggtattatgacattgacgcccaaacgtttgctgattggggcgttgacctgctgaaattcgatggttgctactgtgacagcctcgaaaacctggcagacggctacaagcatatgtctctcgccctgaatagaaccggtcggccaatcgtatattcctgcgagtggcctctttacatgtggccatttcagaaaccgaactacacagaaattcgccagtattgcaatcattggaggaacttcgctgatatcgatgactcatggcaatccataaagagcatcttggactggaccagtcggaatcaggagcgaattgtggatgtcgcaggccctggaggatggaacgatccagacatgctggtgatcggcaattttggcctctcttgggaccagcaggttacccaaatggctctgtgggcaattatggccggtcctcttttcatgagcaacgatctgcgcgcgatctcaccacaggcaaaggccctgctccaagacaaagatgtgatagccatcaatcaggacccgttgggaaagcagggctaccagctgagaaaaggcgacaactttgaggtctgggaaaggcctttgagtggagatgcgtgggctgtggccattattaatcggcaagagatcggaggtccacgctcctatacaattcctgtagcatctcttggcaagggcgttgcctgtaacccagcttgcttcatcactcagcttctgccggtgaagagaaaactgggtttctacgaagctaccagcaggctccgatcccacatcaaccctacaggaaccgtcctcttgcagctggagaatacgatgcagacttcactgaaggacctcctg

SEQ ID NO: 1094 - protein, 398 aa, Artificial Sequence
  variant of human alpha-galactosidase A
LDNGLARTPPMGWLHWERFMCNLDCQEEPDSCISEKLFEEMAERMVTEGWKDAGYEYLCIDDCWMAPQRDSEGRLQADPQRFPHGIRQLANHVHSKGLKLGIYADVGNKTCAGFPGSFGYYDIDAQTFADWGVDLLKFDGCYCDSLENLADGYKHMSLALNRTGRPIVYSCEWPLYMWPFQKPNYTEIRQYCNHWRNFADIDDSWQSIKSILDWTSRNQERIVDVAGPGGWNDPDMLVIGNFGLSWDQQVTQMALWAIMAGPLFMSNDLRAISPQAKALLQDKDVIAINQDPLGKQGYQLRKGDNFEVWERPLSGDAWAVAIINRQEIGGPRSYTIPVASLGKGVACNPACFITQLLPVKRKLGFYEATSRLRSHINPTGTVLLQLENTMQTSLKDLL

SEQ ID NO: 1095 - DNA, 1194 bp, Artificial Sequence
  variant of human alpha-galactosidase A
ctggataatggattggctagaacacctcctatggggtggcttcactgggagaggttcatgtgcaacctggactgtcaggaagaaccagacagctgcatctccgagaagctctttgaggaaatggccgaacgaatggtgactgagggctggaaagatgcaggttacgagtatctgtgtattgacgattgctggatggccccacaacgggattctgagggaagacttcaggctgatccgcagcgcttccctcatggcataaggcagctggcaaaccacgtccacagtaaggggctcaaattgggaatctacgcggacgtgggcaataagacctgtgccggttttccgggatcattcgggtattatgacattgacgcccaaacgtttgctgattggggcgttgacctgctgaaattcgatggttgctactgtgacagcctcgaaaacctggcagacggctacaagcatatgtctctcgccctgaatagaaccggtcggccaatcgtatattcctgcgagtggcctctttacatgtggccatttcagaaaccgaactacacagaaattcgccagtattgcaatcattggaggaacttcgctgatatcgatgactcatggcgttccataaagagcatcttggactggaccagtcggaatcaggagcgaattgtggatgtcgcaggccctggaggatggaacgatccagacatgctggtgatcggcaattttggcctctcttgggaccagcaggttacccaaatggctctgtgggcaattatggccggtcctcttttcatgagcaacgatctgcgcgcgatctcaccacaggcaaaggccctgctccaagacaaagatgtgatagccatcaatcaggacccgttgggaaagcagggctaccagctgagaaaaggcgacaactttgaggtctgggaaaggcctttgagtggagatgcgtgggctgtggccattattaatcggcaagagatcggaggtccacgctcctatacaattcctgtagcatctcttggcaagggcgttgcctgtaacccagcttgcttcatcactcagcttctgccggtgaagagaaaactgggtttctacgaagctaccagcaggctccgatcccacatcaaccctacaggaaccgtcctcttgcagctggagaatacgatgcagacttcactgaaggacctcctg

SEQ ID NO: 1096 - protein, 398 aa, Artificial Sequence
  variant of human alpha-galactosidase A
LDNGLARTPPMGWLHWERFMCNLDCQEEPDSCISEKLFEEMAERMVTEGWKDAGYEYLCIDDCWMAPQRDSEGRLQADPQRFPHGIRQLANHVHSKGLKLGIYADVGNKTCAGFPGSFGYYDIDAQTFADWGVDLLKFDGCYCDSLENLADGYKHMSLALNRTGRPIVYSCEWPLYMWPFQKPNYTEIRQYCNHWRNFADIDDSWRSIKSILDWTSRNQERIVDVAGPGGWNDPDMLVIGNFGLSWDQQVTQMALWAIMAGPLFMSNDLRAISPQAKALLQDKDVIAINQDPLGKQGYQLRKGDNFEVWERPLSGDAWAVAIINRQEIGGPRSYTIPVASLGKGVACNPACFITQLLPVKRKLGFYEATSRLRSHINPTGTVLLQLENTMQTSLKDLL

SEQ ID NO: 1097 - DNA, 1194 bp, Artificial Sequence
  variant of human alpha-galactosidase A
ctggataatggattggctagaacacctcctatggggtggcttcactgggagaggttcatgtgcaacctggactgtcaggaagaaccagacagctgcatctccgagaagctctttgaggaaatggccgaacgaatggtgactgagggctggaaagatgcaggttacgagtatctgtgtattgacgattgctggatggccccacaacgggattctgagggaagacttcaggctgatccgcagcgcttccctcatggcataaggcagctggcaaaccacgtccacagtaaggggctcaaattgggaatctacgcggacgtgggcaataagacctgtgccggttttccgggatcattcgggtattatgacattgacgcccaaacgtttgctgattggggcgttgacctgctgaaattcgatggttgctactgtgacagcctcgaaaacctggcagacggctacaagcatatgtctctcgccctgaatagaaccggtcggccaatcgtatattcctgcgagtggcctctttacatgtggccatttcagaaaccgaactacacagaaattcgccagtattgcaatcattggaggaacttcgctgatatcgatgactcatggagttccataaagagcatcttggactggaccagtcggaatcaggagcgaattgtggatgtcgcaggccctggaggatggaacgatccagacatgctggtgatcggcaattttggcctctcttgggaccagcaggttacccaaatggctctgtgggcaattatggccggtcctcttttcatgagcaacgatctgcgcgcgatctcaccacaggcaaaggccctgctccaagacaaagatgtgatagccatcaatcaggacccgttgggaaagcagggctaccagctgagaaaaggcgacaactttgaggtctgggaaaggcctttgagtggagatgcgtgggctgtggccattattaatcggcaagagatcggaggtccacgctcctatacaattcctgtagcatctcttggcaagggcgttgcctgtaacccagcttgcttcatcactcagcttctgccggtgaagagaaaactgggtttctacgaagctaccagcaggctccgatcccacatcaaccctacaggaaccgtcctcttgcagctggagaatacgatgcagacttcactgaaggacctcctg

SEQ ID NO: 1098 - protein, 398 aa, Artificial Sequence; identical to SEQ ID NO: 136
  variant of human alpha-galactosidase A

SEQ ID NO: 1099 - DNA, 1194 bp, Artificial Sequence
  variant of human alpha-galactosidase A
ctggataatggattggctagaacacctcctatggggtggcttcactgggagaggttcatgtgcaacctggactgtcaggaagaaccagacagctgcatctccgagaagctctttgaggaaatggccgaacgaatggtgactgagggctggaaagatgcaggttacgagtatctgtgtattgacgattgctggatggccccacaacgggattctgagggaagacttcaggctgatccgcagcgcttccctcatggcataaggcagctggcaaaccacgtccacagtaaggggctcaaattgggaatctacgcggacgtgggcaataagacctgtgccggttttccgggatcattcgggtattatgacattgacgcccaaacgtttgctgattggggcgttgacctgctgaaattcgatggttgctactgtgacagcctcgaaaacctggcagacggctacaagcatatgtctctcgccctgaatagaaccggtcggccaatcgtatattcctgcgagtggcctctttacatgtggccatttcagaaaccgaactacacagaaattcgccagtattgcaatcattggaggaacttcgctgatatcgatgactcatggacttccataaagagcatcttggactggaccagtcggaatcaggagcgaattgtggatgtcgcaggccctggaggatggaacgatccagacatgctggtgatcggcaattttggcctctcttgggaccagcaggttacccaaatggctctgtgggcaattatggccggtcctcttttcatgagcaacgatctgcgcgcgatctcaccacaggcaaaggccctgctccaagacaaagatgtgatagccatcaatcaggacccgttgggaaagcagggctaccagctgagaaaaggcgacaactttgaggtctgggaaaggcctttgagtggagatgcgtgggctgtggccattattaatcggcaagagatcggaggtccacgctcctatacaattcctgtagcatctcttggcaagggcgttgcctgtaacccagcttgcttcatcactcagcttctgccggtgaagagaaaactgggtttctacgaagctaccagcaggctccgatcccacatcaaccctacaggaaccgtcctcttgcagctggagaatacgatgcagacttcactgaaggacctcctg

SEQ ID NO: 1100 - protein, 398 aa, Artificial Sequence
  variant of human alpha-galactosidase A
LDNGLARTPPMGWLHWERFMCNLDCQEEPDSCISEKLFEEMAERMVTEGWKDAGYEYLCIDDCWMAPQRDSEGRLQADPQRFPHGIRQLANHVHSKGLKLGIYADVGNKTCAGFPGSFGYYDIDAQTFADWGVDLLKFDGCYCDSLENLADGYKHMSLALNRTGRPIVYSCEWPLYMWPFQKPNYTEIRQYCNHWRNFADIDDSWTSIKSILDWTSRNQERIVDVAGPGGWNDPDMLVIGNFGLSWDQQVTQMALWAIMAGPLFMSNDLRAISPQAKALLQDKDVIAINQDPLGKQGYQLRKGDNFEVWERPLSGDAWAVAIINRQEIGGPRSYTIPVASLGKGVACNPACFITQLLPVKRKLGFYEATSRLRSHINPTGTVLLQLENTMQTSLKDLL

SEQ ID NO: 1101 - DNA, 1194 bp, Artificial Sequence
  variant of human alpha-galactosidase A
ctggataatggattggctagaacacctcctatggggtggcttcactgggagaggttcatgtgcaacctggactgtcaggaagaaccagacagctgcatctccgagaagctctttgaggaaatggccgaacgaatggtgactgagggctggaaagatgcaggttacgagtatctgtgtattgacgattgctggatggccccacaacgggattctgagggaagacttcaggctgatccgcagcgcttccctcatggcataaggcagctggcaaaccacgtccacagtaaggggctcaaattgggaatctacgcggacgtgggcaataagacctgtgccggttttccgggatcattcgggtattatgacattgacgcccaaacgtttgctgattggggcgttgacctgctgaaattcgatggttgctactgtgacagcctcgaaaacctggcagacggctacaagcatatgtctctcgccctgaatagaaccggtcggccaatcgtatattcctgcgagtggcctctttacatgtggccatttcagaaaccgaactacacagaaattcgccagtattgcaatcattggaggaacttcgctgatatcgatgactcatgggtctccataaagagcatcttggactggaccagtcggaatcaggagcgaattgtggatgtcgcaggccctggaggatggaacgatccagacatgctggtgatcggcaattttggcctctcttgggaccagcaggttacccaaatggctctgtgggcaattatggccggtcctcttttcatgagcaacgatctgcgcgcgatctcaccacaggcaaaggccctgctccaagacaaagatgtgatagccatcaatcaggacccgttgggaaagcagggctaccagctgagaaaaggcgacaactttgaggtctgggaaaggcctttgagtggagatgcgtgggctgtggccattattaatcggcaagagatcggaggtccacgctcctatacaattcctgtagcatctcttggcaagggcgttgcctgtaacccagcttgcttcatcactcagcttctgccggtgaagagaaaactgggtttctacgaagctaccagcaggctccgatcccacatcaaccctacaggaaccgtcctcttgcagctggagaatacgatgcagacttcactgaaggacctcctg

SEQ ID NO: 1102 - protein, 398 aa, Artificial Sequence
  variant of human alpha-galactosidase A
LDNGLARTPPMGWLHWERFMCNLDCQEEPDSCISEKLFEEMAERMVTEGWKDAGYEYLCIDDCWMAPQRDSEGRLQADPQRFPHGIRQLANHVHSKGLKLGIYADVGNKTCAGFPGSFGYYDIDAQTFADWGVDLLKFDGCYCDSLENLADGYKHMSLALNRTGRPIVYSCEWPLYMWPFQKPNYTEIRQYCNHWRNFADIDDSWVSIKSILDWTSRNQERIVDVAGPGGWNDPDMLVIGNFGLSWDQQVTQMALWAIMAGPLFMSNDLRAISPQAKALLQDKDVIAINQDPLGKQGYQLRKGDNFEVWERPLSGDAWAVAIINRQEIGGPRSYTIPVASLGKGVACNPACFITQLLPVKRKLGFYEATSRLRSHINPTGTVLLQLENTMQTSLKDLL

SEQ ID NO: 1103 - DNA, 1194 bp, Artificial Sequence
  variant of human alpha-galactosidase A
ctggataatggattggctagaacacctcctatggggtggcttcactgggagaggttcatgtgcaacctggactgtcaggaagaaccagacagctgcatctccgagaagctctttgaggaaatggccgaacgaatggtgactgagggctggaaagatgcaggttacgagtatctgtgtattgacgattgctggatggccccacaacgggattctgagggaagacttcaggctgatccgcagcgcttccctcatggcataaggcagctggcaaaccacgtccacagtaaggggctcaaattgggaatctacgcggacgtgggcaataagacctgtgccggttttccgggatcattcgggtattatgacattgacgcccaaacgtttgctgattggggcgttgacctgctgaaattcgatggttgctactgtgacagcctcgaaaacctggcagacggctacaagcatatgtctctcgccctgaatagaaccggtcggccaatcgtatattcctgcgagtggcctctttacatgtggccatttcagaaaccgaactacacagaaattcgccagtattgcaatcattggaggaacttcgctgatatcgatgactcatggtggtccataaagagcatcttggactggaccagtcggaatcaggagcgaattgtggatgtcgcaggccctggaggatggaacgatccagacatgctggtgatcggcaattttggcctctcttgggaccagcaggttacccaaatggctctgtgggcaattatggccggtcctcttttcatgagcaacgatctgcgcgcgatctcaccacaggcaaaggccctgctccaagacaaagatgtgatagccatcaatcaggacccgttgggaaagcagggctaccagctgagaaaaggcgacaactttgaggtctgggaaaggcctttgagtggagatgcgtgggctgtggccattattaatcggcaagagatcggaggtccacgctcctatacaattcctgtagcatctcttggcaagggcgttgcctgtaacccagcttgcttcatcactcagcttctgccggtgaagagaaaactgggtttctacgaagctaccagcaggctccgatcccacatcaaccctacaggaaccgtcctcttgcagctggagaatacgatgcagacttcactgaaggacctcctg

SEQ ID NO: 1104 - protein, 398 aa, Artificial Sequence
  variant of human alpha-galactosidase A
LDNGLARTPPMGWLHWERFMCNLDCQEEPDSCISEKLFEEMAERMVTEGWKDAGYEYLCIDDCWMAPQRDSEGRLQADPQRFPHGIRQLANHVHSKGLKLGIYADVGNKTCAGFPGSFGYYDIDAQTFADWGVDLLKFDGCYCDSLENLADGYKHMSLALNRTGRPIVYSCEWPLYMWPFQKPNYTEIRQYCNHWRNFADIDDSWWSIKSILDWTSRNQERIVDVAGPGGWNDPDMLVIGNFGLSWDQQVTQMALWAIMAGPLFMSNDLRAISPQAKALLQDKDVIAINQDPLGKQGYQLRKGDNFEVWERPLSGDAWAVAIINRQEIGGPRSYTIPVASLGKGVACNPACFITQLLPVKRKLGFYEATSRLRSHINPTGTVLLQLENTMQTSLKDLL

SEQ ID NO: 1105 - DNA, 1194 bp, Artificial Sequence
  variant of human alpha-galactosidase A
ctggataatggattggctagaacacctcctatggggtggcttcactgggagaggttcatgtgcaacctggactgtcaggaagaaccagacagctgcatctccgagaagctctttgaggaaatggccgaacgaatggtgactgagggctggaaagatgcaggttacgagtatctgtgtattgacgattgctggatggccccacaacgggattctgagggaagacttcaggctgatccgcagcgcttccctcatggcataaggcagctggcaaaccacgtccacagtaaggggctcaaattgggaatctacgcggacgtgggcaataagacctgtgccggttttccgggatcattcgggtattatgacattgacgcccaaacgtttgctgattggggcgttgacctgctgaaattcgatggttgctactgtgacagcctcgaaaacctggcagacggctacaagcatatgtctctcgccctgaatagaaccggtcggccaatcgtatattcctgcgagtggcctctttacatgtggccatttcagaaaccgaactacacagaaattcgccagtattgcaatcattggaggaacttcgctgatatcgatgactcatggtattccataaagagcatcttggactggaccagtcggaatcaggagcgaattgtggatgtcgcaggccctggaggatggaacgatccagacatgctggtgatcggcaattttggcctctcttgggaccagcaggttacccaaatggctctgtgggcaattatggccggtcctcttttcatgagcaacgatctgcgcgcgatctcaccacaggcaaaggccctgctccaagacaaagatgtgatagccatcaatcaggacccgttgggaaagcagggctaccagctgagaaaaggcgacaactttgaggtctgggaaaggcctttgagtggagatgcgtgggctgtggccattattaatcggcaagagatcggaggtccacgctcctatacaattcctgtagcatctcttggcaagggcgttgcctgtaacccagcttgcttcatcactcagcttctgccggtgaagagaaaactgggtttctacgaagctaccagcaggctccgatcccacatcaaccctacaggaaccgtcctcttgcagctggagaatacgatgcagacttcactgaaggacctcctg

SEQ ID NO: 1106 - protein, 398 aa, Artificial Sequence
  variant of human alpha-galactosidase A
LDNGLARTPPMGWLHWERFMCNLDCQEEPDSCISEKLFEEMAERMVTEGWKDAGYEYLCIDDCWMAPQRDSEGRLQADPQRFPHGIRQLANHVHSKGLKLGIYADVGNKTCAGFPGSFGYYDIDAQTFADWGVDLLKFDGCYCDSLENLADGYKHMSLALNRTGRPIVYSCEWPLYMWPFQKPNYTEIRQYCNHWRNFADIDDSWYSIKSILDWTSRNQERIVDVAGPGGWNDPDMLVIGNFGLSWDQQVTQMALWAIMAGPLFMSNDLRAISPQAKALLQDKDVIAINQDPLGKQGYQLRKGDNFEVWERPLSGDAWAVAIINRQEIGGPRSYTIPVASLGKGVACNPACFITQLLPVKRKLGFYEATSRLRSHINPTGTVLLQLENTMQTSLKDLL

SEQ ID NO: 1107 - DNA, 1194 bp, Artificial Sequence
  variant of human alpha-galactosidase A
ctggataatggattggctagaacacctcctatggggtggcttcactgggagaggttcatgtgcaacctggactgtcaggaagaaccagacagctgcatctccgagaagctctttgaggaaatggccgaacgaatggtgactgagggctggaaagatgcaggttacgagtatctgtgtattgacgattgctggatggccccacaacgggattctgagggaagacttcaggctgatccgcagcgcttccctcatggcataaggcagctggcaaaccacgtccacagtaaggggctcaaattgggaatctacgcggacgtgggcaataagacctgtgccggttttccgggatcattcgggtattatgacattgacgcccaaacgtttgctgattggggcgttgacctgctgaaattcgatggttgctactgtgacagcctcgaaaacctggcagacggctacaagcatatgtctctcgccctgaatagaaccggtcggccaatcgtatattcctgcgagtggcctctttacatgtggccatttcagaaaccgaactacacagaaattcgccagtattgcaatcattggaggaacttcgctgatatcgatgactcatgggcctccataaagagcatcttggactggaccagtcggaatcaggagcgaattgtggatgtcgcaggccctggaggatggaacgatccagacatgctggtgatcggcaattttggcctctcttgggaccagcaggttacccaaatggctctgtgggcaattatggccggtcctcttttcatgagcaacgatctgcgctgtatctcaccacaggcaaaggccctgctccaagacaaagatgtgatagccatcaatcaggacccgttgggaaagcagggctaccagctgagaaaaggcgacaactttgaggtctgggaaaggcctttgagtggagatgcgtgggctgtggccattattaatcggcaagagatcggaggtccacgctcctatacaattcctgtagcatctcttggcaagggcgttgcctgtaacccagcttgcttcatcactcagcttctgccggtgaagagaaaactgggtttctacgaagctaccagcaggctccgatcccacatcaaccctacaggaaccgtcctcttgcagctggagaatacgatgcagacttcactgaaggacctcctg

SEQ ID NO: 1108 - protein, 398 aa, Artificial Sequence
  variant of human alpha-galactosidase A
LDNGLARTPPMGWLHWERFMCNLDCQEEPDSCISEKLFEEMAERMVTEGWKDAGYEYLCIDDCWMAPQRDSEGRLQADPQRFPHGIRQLANHVHSKGLKLGIYADVGNKTCAGFPGSFGYYDIDAQTFADWGVDLLKFDGCYCDSLENLADGYKHMSLALNRTGRPIVYSCEWPLYMWPFQKPNYTEIRQYCNHWRNFADIDDSWASIKSILDWTSRNQERIVDVAGPGGWNDPDMLVIGNFGLSWDQQVTQMALWAIMAGPLFMSNDLRCISPQAKALLQDKDVIAINQDPLGKQGYQLRKGDNFEVWERPLSGDAWAVAIINRQEIGGPRSYTIPVASLGKGVACNPACFITQLLPVKRKLGFYEATSRLRSHINPTGTVLLQLENTMQTSLKDLL

SEQ ID NO: 1109 - DNA, 1194 bp, Artificial Sequence
  variant of human alpha-galactosidase A
ctggataatggattggctagaacacctcctatggggtggcttcactgggagaggttcatgtgcaacctggactgtcaggaagaaccagacagctgcatctccgagaagctctttgaggaaatggccgaacgaatggtgactgagggctggaaagatgcaggttacgagtatctgtgtattgacgattgctggatggccccacaacgggattctgagggaagacttcaggctgatccgcagcgcttccctcatggcataaggcagctggcaaaccacgtccacagtaaggggctcaaattgggaatctacgcggacgtgggcaataagacctgtgccggttttccgggatcattcgggtattatgacattgacgcccaaacgtttgctgattggggcgttgacctgctgaaattcgatggttgctactgtgacagcctcgaaaacctggcagacggctacaagcatatgtctctcgccctgaatagaaccggtcggccaatcgtatattcctgcgagtggcctctttacatgtggccatttcagaaaccgaactacacagaaattcgccagtattgcaatcattggaggaacttcgctgatatcgatgactcatgggcctccataaagagcatcttggactggaccagtcggaatcaggagcgaattgtggatgtcgcaggccctggaggatggaacgatccagacatgctggtgatcggcaattttggcctctcttgggaccagcaggttacccaaatggctctgtgggcaattatggccggtcctcttttcatgagcaacgatctgcgcgatatctcaccacaggcaaaggccctgctccaagacaaagatgtgatagccatcaatcaggacccgttgggaaagcagggctaccagctgagaaaaggcgacaactttgaggtctgggaaaggcctttgagtggagatgcgtgggctgtggccattattaatcggcaagagatcggaggtccacgctcctatacaattcctgtagcatctcttggcaagggcgttgcctgtaacccagcttgcttcatcactcagcttctgccggtgaagagaaaactgggtttctacgaagctaccagcaggctccgatcccacatcaaccctacaggaaccgtcctcttgcagctggagaatacgatgcagacttcactgaaggacctcctg

SEQ ID NO: 1110 - protein, 398 aa, Artificial Sequence
  variant of human alpha-galactosidase A
LDNGLARTPPMGWLHWERFMCNLDCQEEPDSCISEKLFEEMAERMVTEGWKDAGYEYLCIDDCWMAPQRDSEGRLQADPQRFPHGIRQLANHVHSKGLKLGIYADVGNKTCAGFPGSFGYYDIDAQTFADWGVDLLKFDGCYCDSLENLADGYKHMSLALNRTGRPIVYSCEWPLYMWPFQKPNYTEIRQYCNHWRNFADIDDSWASIKSILDWTSRNQERIVDVAGPGGWNDPDMLVIGNFGLSWDQQVTQMALWAIMAGPLFMSNDLRDISPQAKALLQDKDVIAINQDPLGKQGYQLRKGDNFEVWERPLSGDAWAVAIINRQEIGGPRSYTIPVASLGKGVACNPACFITQLLPVKRKLGFYEATSRLRSHINPTGTVLLQLENTMQTSLKDLL

SEQ ID NO: 1111 - DNA, 1194 bp, Artificial Sequence
  variant of human alpha-galactosidase A
ctggataatggattggctagaacacctcctatggggtggcttcactgggagaggttcatgtgcaacctggactgtcaggaagaaccagacagctgcatctccgagaagctctttgaggaaatggccgaacgaatggtgactgagggctggaaagatgcaggttacgagtatctgtgtattgacgattgctggatggccccacaacgggattctgagggaagacttcaggctgatccgcagcgcttccctcatggcataaggcagctggcaaaccacgtccacagtaaggggctcaaattgggaatctacgcggacgtgggcaataagacctgtgccggttttccgggatcattcgggtattatgacattgacgcccaaacgtttgctgattggggcgttgacctgctgaaattcgatggttgctactgtgacagcctcgaaaacctggcagacggctacaagcatatgtctctcgccctgaatagaaccggtcggccaatcgtatattcctgcgagtggcctctttacatgtggccatttcagaaaccgaactacacagaaattcgccagtattgcaatcattggaggaacttcgctgatatcgatgactcatgggcctccataaagagcatcttggactggaccagtcggaatcaggagcgaattgtggatgtcgcaggccctggaggatggaacgatccagacatgctggtgatcggcaattttggcctctcttgggaccagcaggttacccaaatggctctgtgggcaattatggccggtcctcttttcatgagcaacgatctgcgcgagatctcaccacaggcaaaggccctgctccaagacaaagatgtgatagccatcaatcaggacccgttgggaaagcagggctaccagctgagaaaaggcgacaactttgaggtctgggaaaggcctttgagtggagatgcgtgggctgtggccattattaatcggcaagagatcggaggtccacgctcctatacaattcctgtagcatctcttggcaagggcgttgcctgtaacccagcttgcttcatcactcagcttctgccggtgaagagaaaactgggtttctacgaagctaccagcaggctccgatcccacatcaaccctacaggaaccgtcctcttgcagctggagaatacgatgcagacttcactgaaggacctcctg

SEQ ID NO: 1112 - protein, 398 aa, Artificial Sequence
  variant of human alpha-galactosidase A
LDNGLARTPPMGWLHWERFMCNLDCQEEPDSCISEKLFEEMAERMVTEGWKDAGYEYLCIDDCWMAPQRDSEGRLQADPQRFPHGIRQLANHVHSKGLKLGIYADVGNKTCAGFPGSFGYYDIDAQTFADWGVDLLKFDGCYCDSLENLADGYKHMSLALNRTGRPIVYSCEWPLYMWPFQKPNYTEIRQYCNHWRNFADIDDSWASIKSILDWTSRNQERIVDVAGPGGWNDPDMLVIGNFGLSWDQQVTQMALWAIMAGPLFMSNDLREISPQAKALLQDKDVIAINQDPLGKQGYQLRKGDNFEVWERPLSGDAWAVAIINRQEIGGPRSYTIPVASLGKGVACNPACFITQLLPVKRKLGFYEATSRLRSHINPTGTVLLQLENTMQTSLKDLL

SEQ ID NO: 1113 - DNA, 1194 bp, Artificial Sequence
  variant of human alpha-galactosidase A
ctggataatggattggctagaacacctcctatggggtggcttcactgggagaggttcatgtgcaacctggactgtcaggaagaaccagacagctgcatctccgagaagctctttgaggaaatggccgaacgaatggtgactgagggctggaaagatgcaggttacgagtatctgtgtattgacgattgctggatggccccacaacgggattctgagggaagacttcaggctgatccgcagcgcttccctcatggcataaggcagctggcaaaccacgtccacagtaaggggctcaaattgggaatctacgcggacgtgggcaataagacctgtgccggttttccgggatcattcgggtattatgacattgacgcccaaacgtttgctgattggggcgttgacctgctgaaattcgatggttgctactgtgacagcctcgaaaacctggcagacggctacaagcatatgtctctcgccctgaatagaaccggtcggccaatcgtatattcctgcgagtggcctctttacatgtggccatttcagaaaccgaactacacagaaattcgccagtattgcaatcattggaggaacttcgctgatatcgatgactcatgggcctccataaagagcatcttggactggaccagtcggaatcaggagcgaattgtggatgtcgcaggccctggaggatggaacgatccagacatgctggtgatcggcaattttggcctctcttgggaccagcaggttacccaaatggctctgtgggcaattatggccggtcctcttttcatgagcaacgatctgcgctttatctcaccacaggcaaaggccctgctccaagacaaagatgtgatagccatcaatcaggacccgttgggaaagcagggctaccagctgagaaaaggcgacaactttgaggtctgggaaaggcctttgagtggagatgcgtgggctgtggccattattaatcggcaagagatcggaggtccacgctcctatacaattcctgtagcatctcttggcaagggcgttgcctgtaacccagcttgcttcatcactcagcttctgccggtgaagagaaaactgggtttctacgaagctaccagcaggctccgatcccacatcaaccctacaggaaccgtcctcttgcagctggagaatacgatgcagacttcactgaaggacctcctg

SEQ ID NO: 1114 - protein, 398 aa, Artificial Sequence
  variant of human alpha-galactosidase A
LDNGLARTPPMGWLHWERFMCNLDCQEEPDSCISEKLFEEMAERMVTEGWKDAGYEYLCIDDCWMAPQRDSEGRLQADPQRFPHGIRQLANHVHSKGLKLGIYADVGNKTCAGFPGSFGYYDIDAQTFADWGVDLLKFDGCYCDSLENLADGYKHMSLALNRTGRPIVYSCEWPLYMWPFQKPNYTEIRQYCNHWRNFADIDDSWASIKSILDWTSRNQERIVDVAGPGGWNDPDMLVIGNFGLSWDQQVTQMALWAIMAGPLFMSNDLRFISPQAKALLQDKDVIAINQDPLGKQGYQLRKGDNFEVWERPLSGDAWAVAIINRQEIGGPRSYTIPVASLGKGVACNPACFITQLLPVKRKLGFYEATSRLRSHINPTGTVLLQLENTMQTSLKDLL

SEQ ID NO: 1115 - DNA, 1194 bp, Artificial Sequence
  variant of human alpha-galactosidase A
ctggataatggattggctagaacacctcctatggggtggcttcactgggagaggttcatgtgcaacctggactgtcaggaagaaccagacagctgcatctccgagaagctctttgaggaaatggccgaacgaatggtgactgagggctggaaagatgcaggttacgagtatctgtgtattgacgattgctggatggccccacaacgggattctgagggaagacttcaggctgatccgcagcgcttccctcatggcataaggcagctggcaaaccacgtccacagtaaggggctcaaattgggaatctacgcggacgtgggcaataagacctgtgccggttttccgggatcattcgggtattatgacattgacgcccaaacgtttgctgattggggcgttgacctgctgaaattcgatggttgctactgtgacagcctcgaaaacctggcagacggctacaagcatatgtctctcgccctgaatagaaccggtcggccaatcgtatattcctgcgagtggcctctttacatgtggccatttcagaaaccgaactacacagaaattcgccagtattgcaatcattggaggaacttcgctgatatcgatgactcatgggcctccataaagagcatcttggactggaccagtcggaatcaggagcgaattgtggatgtcgcaggccctggaggatggaacgatccagacatgctggtgatcggcaattttggcctctcttgggaccagcaggttacccaaatggctctgtgggcaattatggccggtcctcttttcatgagcaacgatctgcgcggtatctcaccacaggcaaaggccctgctccaagacaaagatgtgatagccatcaatcaggacccgttgggaaagcagggctaccagctgagaaaaggcgacaactttgaggtctgggaaaggcctttgagtggagatgcgtgggctgtggccattattaatcggcaagagatcggaggtccacgctcctatacaattcctgtagcatctcttggcaagggcgttgcctgtaacccagcttgcttcatcactcagcttctgccggtgaagagaaaactgggtttctacgaagctaccagcaggctccgatcccacatcaaccctacaggaaccgtcctcttgcagctggagaatacgatgcagacttcactgaaggacctcctg

SEQ ID NO: 1116 - protein, 398 aa, Artificial Sequence
  variant of human alpha-galactosidase A
LDNGLARTPPMGWLHWERFMCNLDCQEEPDSCISEKLFEEMAERMVTEGWKDAGYEYLCIDDCWMAPQRDSEGRLQADPQRFPHGIRQLANHVHSKGLKLGIYADVGNKTCAGFPGSFGYYDIDAQTFADWGVDLLKFDGCYCDSLENLADGYKHMSLALNRTGRPIVYSCEWPLYMWPFQKPNYTEIRQYCNHWRNFADIDDSWASIKSILDWTSRNQERIVDVAGPGGWNDPDMLVIGNFGLSWDQQVTQMALWAIMAGPLFMSNDLRGISPQAKALLQDKDVIAINQDPLGKQGYQLRKGDNFEVWERPLSGDAWAVAIINRQEIGGPRSYTIPVASLGKGVACNPACFITQLLPVKRKLGFYEATSRLRSHINPTGTVLLQLENTMQTSLKDLL

SEQ ID NO: 1117 - DNA, 1194 bp, Artificial Sequence
  variant of human alpha-galactosidase A
ctggataatggattggctagaacacctcctatggggtggcttcactgggagaggttcatgtgcaacctggactgtcaggaagaaccagacagctgcatctccgagaagctctttgaggaaatggccgaacgaatggtgactgagggctggaaagatgcaggttacgagtatctgtgtattgacgattgctggatggccccacaacgggattctgagggaagacttcaggctgatccgcagcgcttccctcatggcataaggcagctggcaaaccacgtccacagtaaggggctcaaattgggaatctacgcggacgtgggcaataagacctgtgccggttttccgggatcattcgggtattatgacattgacgcccaaacgtttgctgattggggcgttgacctgctgaaattcgatggttgctactgtgacagcctcgaaaacctggcagacggctacaagcatatgtctctcgccctgaatagaaccggtcggccaatcgtatattcctgcgagtggcctctttacatgtggccatttcagaaaccgaactacacagaaattcgccagtattgcaatcattggaggaacttcgctgatatcgatgactcatgggcctccataaagagcatcttggactggaccagtcggaatcaggagcgaattgtggatgtcgcaggccctggaggatggaacgatccagacatgctggtgatcggcaattttggcctctcttgggaccagcaggttacccaaatggctctgtgggcaattatggccggtcctcttttcatgagcaacgatctgcgccacatctcaccacaggcaaaggccctgctccaagacaaagatgtgatagccatcaatcaggacccgttgggaaagcagggctaccagctgagaaaaggcgacaactttgaggtctgggaaaggcctttgagtggagatgcgtgggctgtggccattattaatcggcaagagatcggaggtccacgctcctatacaattcctgtagcatctcttggcaagggcgttgcctgtaacccagcttgcttcatcactcagcttctgccggtgaagagaaaactgggtttctacgaagctaccagcaggctccgatcccacatcaaccctacaggaaccgtcctcttgcagctggagaatacgatgcagacttcactgaaggacctcctg

SEQ ID NO: 1118 - protein, 398 aa, Artificial Sequence
  variant of human alpha-galactosidase A
LDNGLARTPPMGWLHWERFMCNLDCQEEPDSCISEKLFEEMAERMVTEGWKDAGYEYLCIDDCWMAPQRDSEGRLQADPQRFPHGIRQLANHVHSKGLKLGIYADVGNKTCAGFPGSFGYYDIDAQTFADWGVDLLKFDGCYCDSLENLADGYKHMSLALNRTGRPIVYSCEWPLYMWPFQKPNYTEIRQYCNHWRNFADIDDSWASIKSILDWTSRNQERIVDVAGPGGWNDPDMLVIGNFGLSWDQQVTQMALWAIMAGPLFMSNDLRHISPQAKALLQDKDVIAINQDPLGKQGYQLRKGDNFEVWERPLSGDAWAVAIINRQEIGGPRSYTIPVASLGKGVACNPACFITQLLPVKRKLGFYEATSRLRSHINPTGTVLLQLENTMQTSLKDLL

SEQ ID NO: 1119 - DNA, 1194 bp, Artificial Sequence
  variant of human alpha-galactosidase A
ctggataatggattggctagaacacctcctatggggtggcttcactgggagaggttcatgtgcaacctggactgtcaggaagaaccagacagctgcatctccgagaagctctttgaggaaatggccgaacgaatggtgactgagggctggaaagatgcaggttacgagtatctgtgtattgacgattgctggatggccccacaacgggattctgagggaagacttcaggctgatccgcagcgcttccctcatggcataaggcagctggcaaaccacgtccacagtaaggggctcaaattgggaatctacgcggacgtgggcaataagacctgtgccggttttccgggatcattcgggtattatgacattgacgcccaaacgtttgctgattggggcgttgacctgctgaaattcgatggttgctactgtgacagcctcgaaaacctggcagacggctacaagcatatgtctctcgccctgaatagaaccggtcggccaatcgtatattcctgcgagtggcctctttacatgtggccatttcagaaaccgaactacacagaaattcgccagtattgcaatcattggaggaacttcgctgatatcgatgactcatgggcctccataaagagcatcttggactggaccagtcggaatcaggagcgaattgtggatgtcgcaggccctggaggatggaacgatccagacatgctggtgatcggcaattttggcctctcttgggaccagcaggttacccaaatggctctgtgggcaattatggccggtcctcttttcatgagcaacgatctgcgcattatctcaccacaggcaaaggccctgctccaagacaaagatgtgatagccatcaatcaggacccgttgggaaagcagggctaccagctgagaaaaggcgacaactttgaggtctgggaaaggcctttgagtggagatgcgtgggctgtggccattattaatcggcaagagatcggaggtccacgctcctatacaattcctgtagcatctcttggcaagggcgttgcctgtaacccagcttgcttcatcactcagcttctgccggtgaagagaaaactgggtttctacgaagctaccagcaggctccgatcccacatcaaccctacaggaaccgtcctcttgcagctggagaatacgatgcagacttcactgaaggacctcctg

SEQ ID NO: 1120 - protein, 398 aa, Artificial Sequence
  variant of human alpha-galactosidase A
LDNGLARTPPMGWLHWERFMCNLDCQEEPDSCISEKLFEEMAERMVTEGWKDAGYEYLCIDDCWMAPQRDSEGRLQADPQRFPHGIRQLANHVHSKGLKLGIYADVGNKTCAGFPGSFGYYDIDAQTFADWGVDLLKFDGCYCDSLENLADGYKHMSLALNRTGRPIVYSCEWPLYMWPFQKPNYTEIRQYCNHWRNFADIDDSWASIKSILDWTSRNQERIVDVAGPGGWNDPDMLVIGNFGLSWDQQVTQMALWAIMAGPLFMSNDLRIISPQAKALLQDKDVIAINQDPLGKQGYQLRKGDNFEVWERPLSGDAWAVAIINRQEIGGPRSYTIPVASLGKGVACNPACFITQLLPVKRKLGFYEATSRLRSHINPTGTVLLQLENTMQTSLKDLL

SEQ ID NO: 1121 - DNA, 1194 bp, Artificial Sequence
  variant of human alpha-galactosidase A
ctggataatggattggctagaacacctcctatggggtggcttcactgggagaggttcatgtgcaacctggactgtcaggaagaaccagacagctgcatctccgagaagctctttgaggaaatggccgaacgaatggtgactgagggctggaaagatgcaggttacgagtatctgtgtattgacgattgctggatggccccacaacgggattctgagggaagacttcaggctgatccgcagcgcttccctcatggcataaggcagctggcaaaccacgtccacagtaaggggctcaaattgggaatctacgcggacgtgggcaataagacctgtgccggttttccgggatcattcgggtattatgacattgacgcccaaacgtttgctgattggggcgttgacctgctgaaattcgatggttgctactgtgacagcctcgaaaacctggcagacggctacaagcatatgtctctcgccctgaatagaaccggtcggccaatcgtatattcctgcgagtggcctctttacatgtggccatttcagaaaccgaactacacagaaattcgccagtattgcaatcattggaggaacttcgctgatatcgatgactcatgggcctccataaagagcatcttggactggaccagtcggaatcaggagcgaattgtggatgtcgcaggccctggaggatggaacgatccagacatgctggtgatcggcaattttggcctctcttgggaccagcaggttacccaaatggctctgtgggcaattatggccggtcctcttttcatgagcaacgatctgcgcaagatctcaccacaggcaaaggccctgctccaagacaaagatgtgatagccatcaatcaggacccgttgggaaagcagggctaccagctgagaaaaggcgacaactttgaggtctgggaaaggcctttgagtggagatgcgtgggctgtggccattattaatcggcaagagatcggaggtccacgctcctatacaattcctgtagcatctcttggcaagggcgttgcctgtaacccagcttgcttcatcactcagcttctgccggtgaagagaaaactgggtttctacgaagctaccagcaggctccgatcccacatcaaccctacaggaaccgtcctcttgcagctggagaatacgatgcagacttcactgaaggacctcctg

SEQ ID NO: 1122 - protein, 398 aa, Artificial Sequence
  variant of human alpha-galactosidase A
LDNGLARTPPMGWLHWERFMCNLDCQEEPDSCISEKLFEEMAERMVTEGWKDAGYEYLCIDDCWMAPQRDSEGRLQADPQRFPHGIRQLANHVHSKGLKLGIYADVGNKTCAGFPGSFGYYDIDAQTFADWGVDLLKFDGCYCDSLENLADGYKHMSLALNRTGRPIVYSCEWPLYMWPFQKPNYTEIRQYCNHWRNFADIDDSWASIKSILDWTSRNQERIVDVAGPGGWNDPDMLVIGNFGLSWDQQVTQMALWAIMAGPLFMSNDLRKISPQAKALLQDKDVIAINQDPLGKQGYQLRKGDNFEVWERPLSGDAWAVAIINRQEIGGPRSYTIPVASLGKGVACNPACFITQLLPVKRKLGFYEATSRLRSHINPTGTVLLQLENTMQTSLKDLL

SEQ ID NO: 1123 - DNA, 1194 bp, Artificial Sequence
  variant of human alpha-galactosidase A
ctggataatggattggctagaacacctcctatggggtggcttcactgggagaggttcatgtgcaacctggactgtcaggaagaaccagacagctgcatctccgagaagctctttgaggaaatggccgaacgaatggtgactgagggctggaaagatgcaggttacgagtatctgtgtattgacgattgctggatggccccacaacgggattctgagggaagacttcaggctgatccgcagcgcttccctcatggcataaggcagctggcaaaccacgtccacagtaaggggctcaaattgggaatctacgcggacgtgggcaataagacctgtgccggttttccgggatcattcgggtattatgacattgacgcccaaacgtttgctgattggggcgttgacctgctgaaattcgatggttgctactgtgacagcctcgaaaacctggcagacggctacaagcatatgtctctcgccctgaatagaaccggtcggccaatcgtatattcctgcgagtggcctctttacatgtggccatttcagaaaccgaactacacagaaattcgccagtattgcaatcattggaggaacttcgctgatatcgatgactcatgggcctccataaagagcatcttggactggaccagtcggaatcaggagcgaattgtggatgtcgcaggccctggaggatggaacgatccagacatgctggtgatcggcaattttggcctctcttgggaccagcaggttacccaaatggctctgtgggcaattatggccggtcctcttttcatgagcaacgatctgcgcttgatctcaccacaggcaaaggccctgctccaagacaaagatgtgatagccatcaatcaggacccgttgggaaagcagggctaccagctgagaaaaggcgacaactttgaggtctgggaaaggcctttgagtggagatgcgtgggctgtggccattattaatcggcaagagatcggaggtccacgctcctatacaattcctgtagcatctcttggcaagggcgttgcctgtaacccagcttgcttcatcactcagcttctgccggtgaagagaaaactgggtttctacgaagctaccagcaggctccgatcccacatcaaccctacaggaaccgtcctcttgcagctggagaatacgatgcagacttcactgaaggacctcctg

SEQ ID NO: 1124 - protein, 398 aa, Artificial Sequence
  variant of human alpha-galactosidase A
LDNGLARTPPMGWLHWERFMCNLDCQEEPDSCISEKLFEEMAERMVTEGWKDAGYEYLCIDDCWMAPQRDSEGRLQADPQRFPHGIRQLANHVHSKGLKLGIYADVGNKTCAGFPGSFGYYDIDAQTFADWGVDLLKFDGCYCDSLENLADGYKHMSLALNRTGRPIVYSCEWPLYMWPFQKPNYTEIRQYCNHWRNFADIDDSWASIKSILDWTSRNQERIVDVAGPGGWNDPDMLVIGNFGLSWDQQVTQMALWAIMAGPLFMSNDLRLISPQAKALLQDKDVIAINQDPLGKQGYQLRKGDNFEVWERPLSGDAWAVAIINRQEIGGPRSYTIPVASLGKGVACNPACFITQLLPVKRKLGFYEATSRLRSHINPTGTVLLQLENTMQTSLKDLL

SEQ ID NO: 1125 - DNA, 1194 bp, Artificial Sequence
  variant of human alpha-galactosidase A
ctggataatggattggctagaacacctcctatggggtggcttcactgggagaggttcatgtgcaacctggactgtcaggaagaaccagacagctgcatctccgagaagctctttgaggaaatggccgaacgaatggtgactgagggctggaaagatgcaggttacgagtatctgtgtattgacgattgctggatggccccacaacgggattctgagggaagacttcaggctgatccgcagcgcttccctcatggcataaggcagctggcaaaccacgtccacagtaaggggctcaaattgggaatctacgcggacgtgggcaataagacctgtgccggttttccgggatcattcgggtattatgacattgacgcccaaacgtttgctgattggggcgttgacctgctgaaattcgatggttgctactgtgacagcctcgaaaacctggcagacggctacaagcatatgtctctcgccctgaatagaaccggtcggccaatcgtatattcctgcgagtggcctctttacatgtggccatttcagaaaccgaactacacagaaattcgccagtattgcaatcattggaggaacttcgctgatatcgatgactcatgggcctccataaagagcatcttggactggaccagtcggaatcaggagcgaattgtggatgtcgcaggccctggaggatggaacgatccagacatgctggtgatcggcaattttggcctctcttgggaccagcaggttacccaaatggctctgtgggcaattatggccggtcctcttttcatgagcaacgatctgcgcatgatctcaccacaggcaaaggccctgctccaagacaaagatgtgatagccatcaatcaggacccgttgggaaagcagggctaccagctgagaaaaggcgacaactttgaggtctgggaaaggcctttgagtggagatgcgtgggctgtggccattattaatcggcaagagatcggaggtccacgctcctatacaattcctgtagcatctcttggcaagggcgttgcctgtaacccagcttgcttcatcactcagcttctgccggtgaagagaaaactgggtttctacgaagctaccagcaggctccgatcccacatcaaccctacaggaaccgtcctcttgcagctggagaatacgatgcagacttcactgaaggacctcctg

SEQ ID NO: 1126 - protein, 398 aa, Artificial Sequence
  variant of human alpha-galactosidase A
LDNGLARTPPMGWLHWERFMCNLDCQEEPDSCISEKLFEEMAERMVTEGWKDAGYEYLCIDDCWMAPQRDSEGRLQADPQRFPHGIRQLANHVHSKGLKLGIYADVGNKTCAGFPGSFGYYDIDAQTFADWGVDLLKFDGCYCDSLENLADGYKHMSLALNRTGRPIVYSCEWPLYMWPFQKPNYTEIRQYCNHWRNFADIDDSWASIKSILDWTSRNQERIVDVAGPGGWNDPDMLVIGNFGLSWDQQVTQMALWAIMAGPLFMSNDLRMISPQAKALLQDKDVIAINQDPLGKQGYQLRKGDNFEVWERPLSGDAWAVAIINRQEIGGPRSYTIPVASLGKGVACNPACFITQLLPVKRKLGFYEATSRLRSHINPTGTVLLQLENTMQTSLKDLL

SEQ ID NO: 1127 - DNA, 1194 bp, Artificial Sequence
  variant of human alpha-galactosidase A
ctggataatggattggctagaacacctcctatggggtggcttcactgggagaggttcatgtgcaacctggactgtcaggaagaaccagacagctgcatctccgagaagctctttgaggaaatggccgaacgaatggtgactgagggctggaaagatgcaggttacgagtatctgtgtattgacgattgctggatggccccacaacgggattctgagggaagacttcaggctgatccgcagcgcttccctcatggcataaggcagctggcaaaccacgtccacagtaaggggctcaaattgggaatctacgcggacgtgggcaataagacctgtgccggttttccgggatcattcgggtattatgacattgacgcccaaacgtttgctgattggggcgttgacctgctgaaattcgatggttgctactgtgacagcctcgaaaacctggcagacggctacaagcatatgtctctcgccctgaatagaaccggtcggccaatcgtatattcctgcgagtggcctctttacatgtggccatttcagaaaccgaactacacagaaattcgccagtattgcaatcattggaggaacttcgctgatatcgatgactcatgggcctccataaagagcatcttggactggaccagtcggaatcaggagcgaattgtggatgtcgcaggccctggaggatggaacgatccagacatgctggtgatcggcaattttggcctctcttgggaccagcaggttacccaaatggctctgtgggcaattatggccggtcctcttttcatgagcaacgatctgcgcaatatctcaccacaggcaaaggccctgctccaagacaaagatgtgatagccatcaatcaggacccgttgggaaagcagggctaccagctgagaaaaggcgacaactttgaggtctgggaaaggcctttgagtggagatgcgtgggctgtggccattattaatcggcaagagatcggaggtccacgctcctatacaattcctgtagcatctcttggcaagggcgttgcctgtaacccagcttgcttcatcactcagcttctgccggtgaagagaaaactgggtttctacgaagctaccagcaggctccgatcccacatcaaccctacaggaaccgtcctcttgcagctggagaatacgatgcagacttcactgaaggacctcctg

SEQ ID NO: 1128 - protein, 398 aa, Artificial Sequence
  variant of human alpha-galactosidase A
LDNGLARTPPMGWLHWERFMCNLDCQEEPDSCISEKLFEEMAERMVTEGWKDAGYEYLCIDDCWMAPQRDSEGRLQADPQRFPHGIRQLANHVHSKGLKLGIYADVGNKTCAGFPGSFGYYDIDAQTFADWGVDLLKFDGCYCDSLENLADGYKHMSLALNRTGRPIVYSCEWPLYMWPFQKPNYTEIRQYCNHWRNFADIDDSWASIKSILDWTSRNQERIVDVAGPGGWNDPDMLVIGNFGLSWDQQVTQMALWAIMAGPLFMSNDLRNISPQAKALLQDKDVIAINQDPLGKQGYQLRKGDNFEVWERPLSGDAWAVAIINRQEIGGPRSYTIPVASLGKGVACNPACFITQLLPVKRKLGFYEATSRLRSHINPTGTVLLQLENTMQTSLKDLL

SEQ ID NO: 1129 - DNA, 1194 bp, Artificial Sequence
  variant of human alpha-galactosidase A
ctggataatggattggctagaacacctcctatggggtggcttcactgggagaggttcatgtgcaacctggactgtcaggaagaaccagacagctgcatctccgagaagctctttgaggaaatggccgaacgaatggtgactgagggctggaaagatgcaggttacgagtatctgtgtattgacgattgctggatggccccacaacgggattctgagggaagacttcaggctgatccgcagcgcttccctcatggcataaggcagctggcaaaccacgtccacagtaaggggctcaaattgggaatctacgcggacgtgggcaataagacctgtgccggttttccgggatcattcgggtattatgacattgacgcccaaacgtttgctgattggggcgttgacctgctgaaattcgatggttgctactgtgacagcctcgaaaacctggcagacggctacaagcatatgtctctcgccctgaatagaaccggtcggccaatcgtatattcctgcgagtggcctctttacatgtggccatttcagaaaccgaactacacagaaattcgccagtattgcaatcattggaggaacttcgctgatatcgatgactcatgggcctccataaagagcatcttggactggaccagtcggaatcaggagcgaattgtggatgtcgcaggccctggaggatggaacgatccagacatgctggtgatcggcaattttggcctctcttgggaccagcaggttacccaaatggctctgtgggcaattatggccggtcctcttttcatgagcaacgatctgcgccctatctcaccacaggcaaaggccctgctccaagacaaagatgtgatagccatcaatcaggacccgttgggaaagcagggctaccagctgagaaaaggcgacaactttgaggtctgggaaaggcctttgagtggagatgcgtgggctgtggccattattaatcggcaagagatcggaggtccacgctcctatacaattcctgtagcatctcttggcaagggcgttgcctgtaacccagcttgcttcatcactcagcttctgccggtgaagagaaaactgggtttctacgaagctaccagcaggctccgatcccacatcaaccctacaggaaccgtcctcttgcagctggagaatacgatgcagacttcactgaaggacctcctg

SEQ ID NO: 1130 - protein, 398 aa, Artificial Sequence
  variant of human alpha-galactosidase A
LDNGLARTPPMGWLHWERFMCNLDCQEEPDSCISEKLFEEMAERMVTEGWKDAGYEYLCIDDCWMAPQRDSEGRLQADPQRFPHGIRQLANHVHSKGLKLGIYADVGNKTCAGFPGSFGYYDIDAQTFADWGVDLLKFDGCYCDSLENLADGYKHMSLALNRTGRPIVYSCEWPLYMWPFQKPNYTEIRQYCNHWRNFADIDDSWASIKSILDWTSRNQERIVDVAGPGGWNDPDMLVIGNFGLSWDQQVTQMALWAIMAGPLFMSNDLRPISPQAKALLQDKDVIAINQDPLGKQGYQLRKGDNFEVWERPLSGDAWAVAIINRQEIGGPRSYTIPVASLGKGVACNPACFITQLLPVKRKLGFYEATSRLRSHINPTGTVLLQLENTMQTSLKDLL

SEQ ID NO: 1131 - DNA, 1194 bp, Artificial Sequence
  variant of human alpha-galactosidase A
ctggataatggattggctagaacacctcctatggggtggcttcactgggagaggttcatgtgcaacctggactgtcaggaagaaccagacagctgcatctccgagaagctctttgaggaaatggccgaacgaatggtgactgagggctggaaagatgcaggttacgagtatctgtgtattgacgattgctggatggccccacaacgggattctgagggaagacttcaggctgatccgcagcgcttccctcatggcataaggcagctggcaaaccacgtccacagtaaggggctcaaattgggaatctacgcggacgtgggcaataagacctgtgccggttttccgggatcattcgggtattatgacattgacgcccaaacgtttgctgattggggcgttgacctgctgaaattcgatggttgctactgtgacagcctcgaaaacctggcagacggctacaagcatatgtctctcgccctgaatagaaccggtcggccaatcgtatattcctgcgagtggcctctttacatgtggccatttcagaaaccgaactacacagaaattcgccagtattgcaatcattggaggaacttcgctgatatcgatgactcatgggcctccataaagagcatcttggactggaccagtcggaatcaggagcgaattgtggatgtcgcaggccctggaggatggaacgatccagacatgctggtgatcggcaattttggcctctcttgggaccagcaggttacccaaatggctctgtgggcaattatggccggtcctcttttcatgagcaacgatctgcgccagatctcaccacaggcaaaggccctgctccaagacaaagatgtgatagccatcaatcaggacccgttgggaaagcagggctaccagctgagaaaaggcgacaactttgaggtctgggaaaggcctttgagtggagatgcgtgggctgtggccattattaatcggcaagagatcggaggtccacgctcctatacaattcctgtagcatctcttggcaagggcgttgcctgtaacccagcttgcttcatcactcagcttctgccggtgaagagaaaactgggtttctacgaagctaccagcaggctccgatcccacatcaaccctacaggaaccgtcctcttgcagctggagaatacgatgcagacttcactgaaggacctcctg

SEQ ID NO: 1132 - protein, 398 aa, Artificial Sequence
  variant of human alpha-galactosidase A
LDNGLARTPPMGWLHWERFMCNLDCQEEPDSCISEKLFEEMAERMVTEGWKDAGYEYLCIDDCWMAPQRDSEGRLQADPQRFPHGIRQLANHVHSKGLKLGIYADVGNKTCAGFPGSFGYYDIDAQTFADWGVDLLKFDGCYCDSLENLADGYKHMSLALNRTGRPIVYSCEWPLYMWPFQKPNYTEIRQYCNHWRNFADIDDSWASIKSILDWTSRNQERIVDVAGPGGWNDPDMLVIGNFGLSWDQQVTQMALWAIMAGPLFMSNDLRQISPQAKALLQDKDVIAINQDPLGKQGYQLRKGDNFEVWERPLSGDAWAVAIINRQEIGGPRSYTIPVASLGKGVACNPACFITQLLPVKRKLGFYEATSRLRSHINPTGTVLLQLENTMQTSLKDLL

SEQ ID NO: 1133 - DNA, 1194 bp, Artificial Sequence
  variant of human alpha-galactosidase A
ctggataatggattggctagaacacctcctatggggtggcttcactgggagaggttcatgtgcaacctggactgtcaggaagaaccagacagctgcatctccgagaagctctttgaggaaatggccgaacgaatggtgactgagggctggaaagatgcaggttacgagtatctgtgtattgacgattgctggatggccccacaacgggattctgagggaagacttcaggctgatccgcagcgcttccctcatggcataaggcagctggcaaaccacgtccacagtaaggggctcaaattgggaatctacgcggacgtgggcaataagacctgtgccggttttccgggatcattcgggtattatgacattgacgcccaaacgtttgctgattggggcgttgacctgctgaaattcgatggttgctactgtgacagcctcgaaaacctggcagacggctacaagcatatgtctctcgccctgaatagaaccggtcggccaatcgtatattcctgcgagtggcctctttacatgtggccatttcagaaaccgaactacacagaaattcgccagtattgcaatcattggaggaacttcgctgatatcgatgactcatgggcctccataaagagcatcttggactggaccagtcggaatcaggagcgaattgtggatgtcgcaggccctggaggatggaacgatccagacatgctggtgatcggcaattttggcctctcttgggaccagcaggttacccaaatggctctgtgggcaattatggccggtcctcttttcatgagcaacgatctgcgccggatctcaccacaggcaaaggccctgctccaagacaaagatgtgatagccatcaatcaggacccgttgggaaagcagggctaccagctgagaaaaggcgacaactttgaggtctgggaaaggcctttgagtggagatgcgtgggctgtggccattattaatcggcaagagatcggaggtccacgctcctatacaattcctgtagcatctcttggcaagggcgttgcctgtaacccagcttgcttcatcactcagcttctgccggtgaagagaaaactgggtttctacgaagctaccagcaggctccgatcccacatcaaccctacaggaaccgtcctcttgcagctggagaatacgatgcagacttcactgaaggacctcctg

SEQ ID NO: 1134 - protein, 398 aa, Artificial Sequence; identical to SEQ ID NO: 208
  variant of human alpha-galactosidase A

SEQ ID NO: 1135 - DNA, 1194 bp, Artificial Sequence
  variant of human alpha-galactosidase A
ctggataatggattggctagaacacctcctatggggtggcttcactgggagaggttcatgtgcaacctggactgtcaggaagaaccagacagctgcatctccgagaagctctttgaggaaatggccgaacgaatggtgactgagggctggaaagatgcaggttacgagtatctgtgtattgacgattgctggatggccccacaacgggattctgagggaagacttcaggctgatccgcagcgcttccctcatggcataaggcagctggcaaaccacgtccacagtaaggggctcaaattgggaatctacgcggacgtgggcaataagacctgtgccggttttccgggatcattcgggtattatgacattgacgcccaaacgtttgctgattggggcgttgacctgctgaaattcgatggttgctactgtgacagcctcgaaaacctggcagacggctacaagcatatgtctctcgccctgaatagaaccggtcggccaatcgtatattcctgcgagtggcctctttacatgtggccatttcagaaaccgaactacacagaaattcgccagtattgcaatcattggaggaacttcgctgatatcgatgactcatgggcctccataaagagcatcttggactggaccagtcggaatcaggagcgaattgtggatgtcgcaggccctggaggatggaacgatccagacatgctggtgatcggcaattttggcctctcttgggaccagcaggttacccaaatggctctgtgggcaattatggccggtcctcttttcatgagcaacgatctgcgctcgatctcaccacaggcaaaggccctgctccaagacaaagatgtgatagccatcaatcaggacccgttgggaaagcagggctaccagctgagaaaaggcgacaactttgaggtctgggaaaggcctttgagtggagatgcgtgggctgtggccattattaatcggcaagagatcggaggtccacgctcctatacaattcctgtagcatctcttggcaagggcgttgcctgtaacccagcttgcttcatcactcagcttctgccggtgaagagaaaactgggtttctacgaagctaccagcaggctccgatcccacatcaaccctacaggaaccgtcctcttgcagctggagaatacgatgcagacttcactgaaggacctcctg

SEQ ID NO: 1136 - protein, 398 aa, Artificial Sequence
  variant of human alpha-galactosidase A
LDNGLARTPPMGWLHWERFMCNLDCQEEPDSCISEKLFEEMAERMVTEGWKDAGYEYLCIDDCWMAPQRDSEGRLQADPQRFPHGIRQLANHVHSKGLKLGIYADVGNKTCAGFPGSFGYYDIDAQTFADWGVDLLKFDGCYCDSLENLADGYKHMSLALNRTGRPIVYSCEWPLYMWPFQKPNYTEIRQYCNHWRNFADIDDSWASIKSILDWTSRNQERIVDVAGPGGWNDPDMLVIGNFGLSWDQQVTQMALWAIMAGPLFMSNDLRSISPQAKALLQDKDVIAINQDPLGKQGYQLRKGDNFEVWERPLSGDAWAVAIINRQEIGGPRSYTIPVASLGKGVACNPACFITQLLPVKRKLGFYEATSRLRSHINPTGTVLLQLENTMQTSLKDLL

SEQ ID NO: 1137 - DNA, 1194 bp, Artificial Sequence
  variant of human alpha-galactosidase A
ctggataatggattggctagaacacctcctatggggtggcttcactgggagaggttcatgtgcaacctggactgtcaggaagaaccagacagctgcatctccgagaagctctttgaggaaatggccgaacgaatggtgactgagggctggaaagatgcaggttacgagtatctgtgtattgacgattgctggatggccccacaacgggattctgagggaagacttcaggctgatccgcagcgcttccctcatggcataaggcagctggcaaaccacgtccacagtaaggggctcaaattgggaatctacgcggacgtgggcaataagacctgtgccggttttccgggatcattcgggtattatgacattgacgcccaaacgtttgctgattggggcgttgacctgctgaaattcgatggttgctactgtgacagcctcgaaaacctggcagacggctacaagcatatgtctctcgccctgaatagaaccggtcggccaatcgtatattcctgcgagtggcctctttacatgtggccatttcagaaaccgaactacacagaaattcgccagtattgcaatcattggaggaacttcgctgatatcgatgactcatgggcctccataaagagcatcttggactggaccagtcggaatcaggagcgaattgtggatgtcgcaggccctggaggatggaacgatccagacatgctggtgatcggcaattttggcctctcttgggaccagcaggttacccaaatggctctgtgggcaattatggccggtcctcttttcatgagcaacgatctgcgcactatctcaccacaggcaaaggccctgctccaagacaaagatgtgatagccatcaatcaggacccgttgggaaagcagggctaccagctgagaaaaggcgacaactttgaggtctgggaaaggcctttgagtggagatgcgtgggctgtggccattattaatcggcaagagatcggaggtccacgctcctatacaattcctgtagcatctcttggcaagggcgttgcctgtaacccagcttgcttcatcactcagcttctgccggtgaagagaaaactgggtttctacgaagctaccagcaggctccgatcccacatcaaccctacaggaaccgtcctcttgcagctggagaatacgatgcagacttcactgaaggacctcctg

SEQ ID NO: 1138 - protein, 398 aa, Artificial Sequence
  variant of human alpha-galactosidase A
LDNGLARTPPMGWLHWERFMCNLDCQEEPDSCISEKLFEEMAERMVTEGWKDAGYEYLCIDDCWMAPQRDSEGRLQADPQRFPHGIRQLANHVHSKGLKLGIYADVGNKTCAGFPGSFGYYDIDAQTFADWGVDLLKFDGCYCDSLENLADGYKHMSLALNRTGRPIVYSCEWPLYMWPFQKPNYTEIRQYCNHWRNFADIDDSWASIKSILDWTSRNQERIVDVAGPGGWNDPDMLVIGNFGLSWDQQVTQMALWAIMAGPLFMSNDLRTISPQAKALLQDKDVIAINQDPLGKQGYQLRKGDNFEVWERPLSGDAWAVAIINRQEIGGPRSYTIPVASLGKGVACNPACFITQLLPVKRKLGFYEATSRLRSHINPTGTVLLQLENTMQTSLKDLL

SEQ ID NO: 1139 - DNA, 1194 bp, Artificial Sequence
  variant of human alpha-galactosidase A
ctggataatggattggctagaacacctcctatggggtggcttcactgggagaggttcatgtgcaacctggactgtcaggaagaaccagacagctgcatctccgagaagctctttgaggaaatggccgaacgaatggtgactgagggctggaaagatgcaggttacgagtatctgtgtattgacgattgctggatggccccacaacgggattctgagggaagacttcaggctgatccgcagcgcttccctcatggcataaggcagctggcaaaccacgtccacagtaaggggctcaaattgggaatctacgcggacgtgggcaataagacctgtgccggttttccgggatcattcgggtattatgacattgacgcccaaacgtttgctgattggggcgttgacctgctgaaattcgatggttgctactgtgacagcctcgaaaacctggcagacggctacaagcatatgtctctcgccctgaatagaaccggtcggccaatcgtatattcctgcgagtggcctctttacatgtggccatttcagaaaccgaactacacagaaattcgccagtattgcaatcattggaggaacttcgctgatatcgatgactcatgggcctccataaagagcatcttggactggaccagtcggaatcaggagcgaattgtggatgtcgcaggccctggaggatggaacgatccagacatgctggtgatcggcaattttggcctctcttgggaccagcaggttacccaaatggctctgtgggcaattatggccggtcctcttttcatgagcaacgatctgcgcgttatctcaccacaggcaaaggccctgctccaagacaaagatgtgatagccatcaatcaggacccgttgggaaagcagggctaccagctgagaaaaggcgacaactttgaggtctgggaaaggcctttgagtggagatgcgtgggctgtggccattattaatcggcaagagatcggaggtccacgctcctatacaattcctgtagcatctcttggcaagggcgttgcctgtaacccagcttgcttcatcactcagcttctgccggtgaagagaaaactgggtttctacgaagctaccagcaggctccgatcccacatcaaccctacaggaaccgtcctcttgcagctggagaatacgatgcagacttcactgaaggacctcctg

SEQ ID NO: 1140 - protein, 398 aa, Artificial Sequence
  variant of human alpha-galactosidase A
LDNGLARTPPMGWLHWERFMCNLDCQEEPDSCISEKLFEEMAERMVTEGWKDAGYEYLCIDDCWMAPQRDSEGRLQADPQRFPHGIRQLANHVHSKGLKLGIYADVGNKTCAGFPGSFGYYDIDAQTFADWGVDLLKFDGCYCDSLENLADGYKHMSLALNRTGRPIVYSCEWPLYMWPFQKPNYTEIRQYCNHWRNFADIDDSWASIKSILDWTSRNQERIVDVAGPGGWNDPDMLVIGNFGLSWDQQVTQMALWAIMAGPLFMSNDLRVISPQAKALLQDKDVIAINQDPLGKQGYQLRKGDNFEVWERPLSGDAWAVAIINRQEIGGPRSYTIPVASLGKGVACNPACFITQLLPVKRKLGFYEATSRLRSHINPTGTVLLQLENTMQTSLKDLL

SEQ ID NO: 1141 - DNA, 1194 bp, Artificial Sequence
  variant of human alpha-galactosidase A
ctggataatggattggctagaacacctcctatggggtggcttcactgggagaggttcatgtgcaacctggactgtcaggaagaaccagacagctgcatctccgagaagctctttgaggaaatggccgaacgaatggtgactgagggctggaaagatgcaggttacgagtatctgtgtattgacgattgctggatggccccacaacgggattctgagggaagacttcaggctgatccgcagcgcttccctcatggcataaggcagctggcaaaccacgtccacagtaaggggctcaaattgggaatctacgcggacgtgggcaataagacctgtgccggttttccgggatcattcgggtattatgacattgacgcccaaacgtttgctgattggggcgttgacctgctgaaattcgatggttgctactgtgacagcctcgaaaacctggcagacggctacaagcatatgtctctcgccctgaatagaaccggtcggccaatcgtatattcctgcgagtggcctctttacatgtggccatttcagaaaccgaactacacagaaattcgccagtattgcaatcattggaggaacttcgctgatatcgatgactcatgggcctccataaagagcatcttggactggaccagtcggaatcaggagcgaattgtggatgtcgcaggccctggaggatggaacgatccagacatgctggtgatcggcaattttggcctctcttgggaccagcaggttacccaaatggctctgtgggcaattatggccggtcctcttttcatgagcaacgatctgcgctggatctcaccacaggcaaaggccctgctccaagacaaagatgtgatagccatcaatcaggacccgttgggaaagcagggctaccagctgagaaaaggcgacaactttgaggtctgggaaaggcctttgagtggagatgcgtgggctgtggccattattaatcggcaagagatcggaggtccacgctcctatacaattcctgtagcatctcttggcaagggcgttgcctgtaacccagcttgcttcatcactcagcttctgccggtgaagagaaaactgggtttctacgaagctaccagcaggctccgatcccacatcaaccctacaggaaccgtcctcttgcagctggagaatacgatgcagacttcactgaaggacctcctg

SEQ ID NO: 1142 - protein, 398 aa, Artificial Sequence
  variant of human alpha-galactosidase A
LDNGLARTPPMGWLHWERFMCNLDCQEEPDSCISEKLFEEMAERMVTEGWKDAGYEYLCIDDCWMAPQRDSEGRLQADPQRFPHGIRQLANHVHSKGLKLGIYADVGNKTCAGFPGSFGYYDIDAQTFADWGVDLLKFDGCYCDSLENLADGYKHMSLALNRTGRPIVYSCEWPLYMWPFQKPNYTEIRQYCNHWRNFADIDDSWASIKSILDWTSRNQERIVDVAGPGGWNDPDMLVIGNFGLSWDQQVTQMALWAIMAGPLFMSNDLRWISPQAKALLQDKDVIAINQDPLGKQGYQLRKGDNFEVWERPLSGDAWAVAIINRQEIGGPRSYTIPVASLGKGVACNPACFITQLLPVKRKLGFYEATSRLRSHINPTGTVLLQLENTMQTSLKDLL

SEQ ID NO: 1143 - DNA, 1194 bp, Artificial Sequence
  variant of human alpha-galactosidase A
ctggataatggattggctagaacacctcctatggggtggcttcactgggagaggttcatgtgcaacctggactgtcaggaagaaccagacagctgcatctccgagaagctctttgaggaaatggccgaacgaatggtgactgagggctggaaagatgcaggttacgagtatctgtgtattgacgattgctggatggccccacaacgggattctgagggaagacttcaggctgatccgcagcgcttccctcatggcataaggcagctggcaaaccacgtccacagtaaggggctcaaattgggaatctacgcggacgtgggcaataagacctgtgccggttttccgggatcattcgggtattatgacattgacgcccaaacgtttgctgattggggcgttgacctgctgaaattcgatggttgctactgtgacagcctcgaaaacctggcagacggctacaagcatatgtctctcgccctgaatagaaccggtcggccaatcgtatattcctgcgagtggcctctttacatgtggccatttcagaaaccgaactacacagaaattcgccagtattgcaatcattggaggaacttcgctgatatcgatgactcatgggcctccataaagagcatcttggactggaccagtcggaatcaggagcgaattgtggatgtcgcaggccctggaggatggaacgatccagacatgctggtgatcggcaattttggcctctcttgggaccagcaggttacccaaatggctctgtgggcaattatggccggtcctcttttcatgagcaacgatctgcgctacatctcaccacaggcaaaggccctgctccaagacaaagatgtgatagccatcaatcaggacccgttgggaaagcagggctaccagctgagaaaaggcgacaactttgaggtctgggaaaggcctttgagtggagatgcgtgggctgtggccattattaatcggcaagagatcggaggtccacgctcctatacaattcctgtagcatctcttggcaagggcgttgcctgtaacccagcttgcttcatcactcagcttctgccggtgaagagaaaactgggtttctacgaagctaccagcaggctccgatcccacatcaaccctacaggaaccgtcctcttgcagctggagaatacgatgcagacttcactgaaggacctcctg

SEQ ID NO: 1144 - protein, 398 aa, Artificial Sequence
  variant of human alpha-galactosidase A
LDNGLARTPPMGWLHWERFMCNLDCQEEPDSCISEKLFEEMAERMVTEGWKDAGYEYLCIDDCWMAPQRDSEGRLQADPQRFPHGIRQLANHVHSKGLKLGIYADVGNKTCAGFPGSFGYYDIDAQTFADWGVDLLKFDGCYCDSLENLADGYKHMSLALNRTGRPIVYSCEWPLYMWPFQKPNYTEIRQYCNHWRNFADIDDSWASIKSILDWTSRNQERIVDVAGPGGWNDPDMLVIGNFGLSWDQQVTQMALWAIMAGPLFMSNDLRYISPQAKALLQDKDVIAINQDPLGKQGYQLRKGDNFEVWERPLSGDAWAVAIINRQEIGGPRSYTIPVASLGKGVACNPACFITQLLPVKRKLGFYEATSRLRSHINPTGTVLLQLENTMQTSLKDLL

SEQ ID NO: 1145 - DNA, 1194 bp, Artificial Sequence
  variant of human alpha-galactosidase A
ctggataatggattggctagaacacctcctatggggtggcttcactgggagaggttcatgtgcaacctggactgtcaggaagaaccagacagctgcatctccgagaagctctttgaggaaatggccgaacgaatggtgactgagggctggaaagatgcaggttacgagtatctgtgtattgacgattgctggatggccccacaacgggattctgagggaagacttcaggctgatccgcagcgcttccctcatggcataaggcagctggcaaaccacgtccacagtaaggggctcaaattgggaatctacgcggacgtgggcaataagacctgtgccggttttccgggatcattcgggtattatgacattgacgcccaaacgtttgctgattggggcgttgacctgctgaaattcgatggttgctactgtgacagcctcgaaaacctggcagacggctacaagcatatgtctctcgccctgaatagaaccggtcggccaatcgtatattcctgcgagtggcctctttacatgtggccatttcagaaaccgaactacacagaaattcgccagtattgcaatcattggaggaacttcgctgatatcgatgactcatgggcctccataaagagcatcttggactggaccagtcggaatcaggagcgaattgtggatgtcgcaggccctggaggatggaacgatccagacatgctggtgatcggcaattttggcctctcttgggaccagcaggttacccaaatggctctgtgggcaattatggccggtcctcttttcatgagcaacgatctgcgcgcgatctcaccacaggcaaaggccctgctccaagacaaagatgtgatagccatcaatcaggacccgttgggaaagcagggctaccagctgagaaaaggcgacaactttgaggtctgggaaaggcctttgagtggagatgcgtgggctgtggccattattaatcggcaagagatcggaggtccacgctcctatacaattcctgtagcatctcttggcaagggcgttgcctgtaacccagcttgcttcatcactcagcttctgccggtgaagagaaaactgggtttctacgaatgtaccagcaggctccgatcccacatcaaccctacaggaaccgtcctcttgcagctggagaatacgatgcagacttcactgaaggacctcctg

SEQ ID NO: 1146 - protein, 398 aa, Artificial Sequence
  variant of human alpha-galactosidase A
LDNGLARTPPMGWLHWERFMCNLDCQEEPDSCISEKLFEEMAERMVTEGWKDAGYEYLCIDDCWMAPQRDSEGRLQADPQRFPHGIRQLANHVHSKGLKLGIYADVGNKTCAGFPGSFGYYDIDAQTFADWGVDLLKFDGCYCDSLENLADGYKHMSLALNRTGRPIVYSCEWPLYMWPFQKPNYTEIRQYCNHWRNFADIDDSWASIKSILDWTSRNQERIVDVAGPGGWNDPDMLVIGNFGLSWDQQVTQMALWAIMAGPLFMSNDLRAISPQAKALLQDKDVIAINQDPLGKQGYQLRKGDNFEVWERPLSGDAWAVAIINRQEIGGPRSYTIPVASLGKGVACNPACFITQLLPVKRKLGFYECTSRLRSHINPTGTVLLQLENTMQTSLKDLL

SEQ ID NO: 1147 - DNA, 1194 bp, Artificial Sequence
  variant of human alpha-galactosidase A
ctggataatggattggctagaacacctcctatggggtggcttcactgggagaggttcatgtgcaacctggactgtcaggaagaaccagacagctgcatctccgagaagctctttgaggaaatggccgaacgaatggtgactgagggctggaaagatgcaggttacgagtatctgtgtattgacgattgctggatggccccacaacgggattctgagggaagacttcaggctgatccgcagcgcttccctcatggcataaggcagctggcaaaccacgtccacagtaaggggctcaaattgggaatctacgcggacgtgggcaataagacctgtgccggttttccgggatcattcgggtattatgacattgacgcccaaacgtttgctgattggggcgttgacctgctgaaattcgatggttgctactgtgacagcctcgaaaacctggcagacggctacaagcatatgtctctcgccctgaatagaaccggtcggccaatcgtatattcctgcgagtggcctctttacatgtggccatttcagaaaccgaactacacagaaattcgccagtattgcaatcattggaggaacttcgctgatatcgatgactcatgggcctccataaagagcatcttggactggaccagtcggaatcaggagcgaattgtggatgtcgcaggccctggaggatggaacgatccagacatgctggtgatcggcaattttggcctctcttgggaccagcaggttacccaaatggctctgtgggcaattatggccggtcctcttttcatgagcaacgatctgcgcgcgatctcaccacaggcaaaggccctgctccaagacaaagatgtgatagccatcaatcaggacccgttgggaaagcagggctaccagctgagaaaaggcgacaactttgaggtctgggaaaggcctttgagtggagatgcgtgggctgtggccattattaatcggcaagagatcggaggtccacgctcctatacaattcctgtagcatctcttggcaagggcgttgcctgtaacccagcttgcttcatcactcagcttctgccggtgaagagaaaactgggtttctacgaagataccagcaggctccgatcccacatcaaccctacaggaaccgtcctcttgcagctggagaatacgatgcagacttcactgaaggacctcctg

SEQ ID NO: 1148 - protein, 398 aa, Artificial Sequence
  variant of human alpha-galactosidase A
LDNGLARTPPMGWLHWERFMCNLDCQEEPDSCISEKLFEEMAERMVTEGWKDAGYEYLCIDDCWMAPQRDSEGRLQADPQRFPHGIRQLANHVHSKGLKLGIYADVGNKTCAGFPGSFGYYDIDAQTFADWGVDLLKFDGCYCDSLENLADGYKHMSLALNRTGRPIVYSCEWPLYMWPFQKPNYTEIRQYCNHWRNFADIDDSWASIKSILDWTSRNQERIVDVAGPGGWNDPDMLVIGNFGLSWDQQVTQMALWAIMAGPLFMSNDLRAISPQAKALLQDKDVIAINQDPLGKQGYQLRKGDNFEVWERPLSGDAWAVAIINRQEIGGPRSYTIPVASLGKGVACNPACFITQLLPVKRKLGFYEDTSRLRSHINPTGTVLLQLENTMQTSLKDLL

SEQ ID NO: 1149 - DNA, 1194 bp, Artificial Sequence
  variant of human alpha-galactosidase A
ctggataatggattggctagaacacctcctatggggtggcttcactgggagaggttcatgtgcaacctggactgtcaggaagaaccagacagctgcatctccgagaagctctttgaggaaatggccgaacgaatggtgactgagggctggaaagatgcaggttacgagtatctgtgtattgacgattgctggatggccccacaacgggattctgagggaagacttcaggctgatccgcagcgcttccctcatggcataaggcagctggcaaaccacgtccacagtaaggggctcaaattgggaatctacgcggacgtgggcaataagacctgtgccggttttccgggatcattcgggtattatgacattgacgcccaaacgtttgctgattggggcgttgacctgctgaaattcgatggttgctactgtgacagcctcgaaaacctggcagacggctacaagcatatgtctctcgccctgaatagaaccggtcggccaatcgtatattcctgcgagtggcctctttacatgtggccatttcagaaaccgaactacacagaaattcgccagtattgcaatcattggaggaacttcgctgatatcgatgactcatgggcctccataaagagcatcttggactggaccagtcggaatcaggagcgaattgtggatgtcgcaggccctggaggatggaacgatccagacatgctggtgatcggcaattttggcctctcttgggaccagcaggttacccaaatggctctgtgggcaattatggccggtcctcttttcatgagcaacgatctgcgcgcgatctcaccacaggcaaaggccctgctccaagacaaagatgtgatagccatcaatcaggacccgttgggaaagcagggctaccagctgagaaaaggcgacaactttgaggtctgggaaaggcctttgagtggagatgcgtgggctgtggccattattaatcggcaagagatcggaggtccacgctcctatacaattcctgtagcatctcttggcaagggcgttgcctgtaacccagcttgcttcatcactcagcttctgccggtgaagagaaaactgggtttctacgaagaaaccagcaggctccgatcccacatcaaccctacaggaaccgtcctcttgcagctggagaatacgatgcagacttcactgaaggacctcctg

SEQ ID NO: 1150 - protein, 398 aa, Artificial Sequence
  variant of human alpha-galactosidase A
LDNGLARTPPMGWLHWERFMCNLDCQEEPDSCISEKLFEEMAERMVTEGWKDAGYEYLCIDDCWMAPQRDSEGRLQADPQRFPHGIRQLANHVHSKGLKLGIYADVGNKTCAGFPGSFGYYDIDAQTFADWGVDLLKFDGCYCDSLENLADGYKHMSLALNRTGRPIVYSCEWPLYMWPFQKPNYTEIRQYCNHWRNFADIDDSWASIKSILDWTSRNQERIVDVAGPGGWNDPDMLVIGNFGLSWDQQVTQMALWAIMAGPLFMSNDLRAISPQAKALLQDKDVIAINQDPLGKQGYQLRKGDNFEVWERPLSGDAWAVAIINRQEIGGPRSYTIPVASLGKGVACNPACFITQLLPVKRKLGFYEETSRLRSHINPTGTVLLQLENTMQTSLKDLL

SEQ ID NO: 1151 - DNA, 1194 bp, Artificial Sequence
  variant of human alpha-galactosidase A
ctggataatggattggctagaacacctcctatggggtggcttcactgggagaggttcatgtgcaacctggactgtcaggaagaaccagacagctgcatctccgagaagctctttgaggaaatggccgaacgaatggtgactgagggctggaaagatgcaggttacgagtatctgtgtattgacgattgctggatggccccacaacgggattctgagggaagacttcaggctgatccgcagcgcttccctcatggcataaggcagctggcaaaccacgtccacagtaaggggctcaaattgggaatctacgcggacgtgggcaataagacctgtgccggttttccgggatcattcgggtattatgacattgacgcccaaacgtttgctgattggggcgttgacctgctgaaattcgatggttgctactgtgacagcctcgaaaacctggcagacggctacaagcatatgtctctcgccctgaatagaaccggtcggccaatcgtatattcctgcgagtggcctctttacatgtggccatttcagaaaccgaactacacagaaattcgccagtattgcaatcattggaggaacttcgctgatatcgatgactcatgggcctccataaagagcatcttggactggaccagtcggaatcaggagcgaattgtggatgtcgcaggccctggaggatggaacgatccagacatgctggtgatcggcaattttggcctctcttgggaccagcaggttacccaaatggctctgtgggcaattatggccggtcctcttttcatgagcaacgatctgcgcgcgatctcaccacaggcaaaggccctgctccaagacaaagatgtgatagccatcaatcaggacccgttgggaaagcagggctaccagctgagaaaaggcgacaactttgaggtctgggaaaggcctttgagtggagatgcgtgggctgtggccattattaatcggcaagagatcggaggtccacgctcctatacaattcctgtagcatctcttggcaagggcgttgcctgtaacccagcttgcttcatcactcagcttctgccggtgaagagaaaactgggtttctacgaatttaccagcaggctccgatcccacatcaaccctacaggaaccgtcctcttgcagctggagaatacgatgcagacttcactgaaggacctcctg

SEQ ID NO: 1152 - protein, 398 aa, Artificial Sequence
  variant of human alpha-galactosidase A
LDNGLARTPPMGWLHWERFMCNLDCQEEPDSCISEKLFEEMAERMVTEGWKDAGYEYLCIDDCWMAPQRDSEGRLQADPQRFPHGIRQLANHVHSKGLKLGIYADVGNKTCAGFPGSFGYYDIDAQTFADWGVDLLKFDGCYCDSLENLADGYKHMSLALNRTGRPIVYSCEWPLYMWPFQKPNYTEIRQYCNHWRNFADIDDSWASIKSILDWTSRNQERIVDVAGPGGWNDPDMLVIGNFGLSWDQQVTQMALWAIMAGPLFMSNDLRAISPQAKALLQDKDVIAINQDPLGKQGYQLRKGDNFEVWERPLSGDAWAVAIINRQEIGGPRSYTIPVASLGKGVACNPACFITQLLPVKRKLGFYEFTSRLRSHINPTGTVLLQLENTMQTSLKDLL

SEQ ID NO: 1153 - DNA, 1194 bp, Artificial Sequence
  variant of human alpha-galactosidase A
ctggataatggattggctagaacacctcctatggggtggcttcactgggagaggttcatgtgcaacctggactgtcaggaagaaccagacagctgcatctccgagaagctctttgaggaaatggccgaacgaatggtgactgagggctggaaagatgcaggttacgagtatctgtgtattgacgattgctggatggccccacaacgggattctgagggaagacttcaggctgatccgcagcgcttccctcatggcataaggcagctggcaaaccacgtccacagtaaggggctcaaattgggaatctacgcggacgtgggcaataagacctgtgccggttttccgggatcattcgggtattatgacattgacgcccaaacgtttgctgattggggcgttgacctgctgaaattcgatggttgctactgtgacagcctcgaaaacctggcagacggctacaagcatatgtctctcgccctgaatagaaccggtcggccaatcgtatattcctgcgagtggcctctttacatgtggccatttcagaaaccgaactacacagaaattcgccagtattgcaatcattggaggaacttcgctgatatcgatgactcatgggcctccataaagagcatcttggactggaccagtcggaatcaggagcgaattgtggatgtcgcaggccctggaggatggaacgatccagacatgctggtgatcggcaattttggcctctcttgggaccagcaggttacccaaatggctctgtgggcaattatggccggtcctcttttcatgagcaacgatctgcgcgcgatctcaccacaggcaaaggccctgctccaagacaaagatgtgatagccatcaatcaggacccgttgggaaagcagggctaccagctgagaaaaggcgacaactttgaggtctgggaaaggcctttgagtggagatgcgtgggctgtggccattattaatcggcaagagatcggaggtccacgctcctatacaattcctgtagcatctcttggcaagggcgttgcctgtaacccagcttgcttcatcactcagcttctgccggtgaagagaaaactgggtttctacgaaggtaccagcaggctccgatcccacatcaaccctacaggaaccgtcctcttgcagctggagaatacgatgcagacttcactgaaggacctcctg

SEQ ID NO: 1154 - protein, 398 aa, Artificial Sequence
  variant of human alpha-galactosidase A
LDNGLARTPPMGWLHWERFMCNLDCQEEPDSCISEKLFEEMAERMVTEGWKDAGYEYLCIDDCWMAPQRDSEGRLQADPQRFPHGIRQLANHVHSKGLKLGIYADVGNKTCAGFPGSFGYYDIDAQTFADWGVDLLKFDGCYCDSLENLADGYKHMSLALNRTGRPIVYSCEWPLYMWPFQKPNYTEIRQYCNHWRNFADIDDSWASIKSILDWTSRNQERIVDVAGPGGWNDPDMLVIGNFGLSWDQQVTQMALWAIMAGPLFMSNDLRAISPQAKALLQDKDVIAINQDPLGKQGYQLRKGDNFEVWERPLSGDAWAVAIINRQEIGGPRSYTIPVASLGKGVACNPACFITQLLPVKRKLGFYEGTSRLRSHINPTGTVLLQLENTMQTSLKDLL

SEQ ID NO: 1155 - DNA, 1194 bp, Artificial Sequence
  variant of human alpha-galactosidase A
ctggataatggattggctagaacacctcctatggggtggcttcactgggagaggttcatgtgcaacctggactgtcaggaagaaccagacagctgcatctccgagaagctctttgaggaaatggccgaacgaatggtgactgagggctggaaagatgcaggttacgagtatctgtgtattgacgattgctggatggccccacaacgggattctgagggaagacttcaggctgatccgcagcgcttccctcatggcataaggcagctggcaaaccacgtccacagtaaggggctcaaattgggaatctacgcggacgtgggcaataagacctgtgccggttttccgggatcattcgggtattatgacattgacgcccaaacgtttgctgattggggcgttgacctgctgaaattcgatggttgctactgtgacagcctcgaaaacctggcagacggctacaagcatatgtctctcgccctgaatagaaccggtcggccaatcgtatattcctgcgagtggcctctttacatgtggccatttcagaaaccgaactacacagaaattcgccagtattgcaatcattggaggaacttcgctgatatcgatgactcatgggcctccataaagagcatcttggactggaccagtcggaatcaggagcgaattgtggatgtcgcaggccctggaggatggaacgatccagacatgctggtgatcggcaattttggcctctcttgggaccagcaggttacccaaatggctctgtgggcaattatggccggtcctcttttcatgagcaacgatctgcgcgcgatctcaccacaggcaaaggccctgctccaagacaaagatgtgatagccatcaatcaggacccgttgggaaagcagggctaccagctgagaaaaggcgacaactttgaggtctgggaaaggcctttgagtggagatgcgtgggctgtggccattattaatcggcaagagatcggaggtccacgctcctatacaattcctgtagcatctcttggcaagggcgttgcctgtaacccagcttgcttcatcactcagcttctgccggtgaagagaaaactgggtttctacgaacataccagcaggctccgatcccacatcaaccctacaggaaccgtcctcttgcagctggagaatacgatgcagacttcactgaaggacctcctg

SEQ ID NO: 1156 - protein, 398 aa, Artificial Sequence
  variant of human alpha-galactosidase A
LDNGLARTPPMGWLHWERFMCNLDCQEEPDSCISEKLFEEMAERMVTEGWKDAGYEYLCIDDCWMAPQRDSEGRLQADPQRFPHGIRQLANHVHSKGLKLGIYADVGNKTCAGFPGSFGYYDIDAQTFADWGVDLLKFDGCYCDSLENLADGYKHMSLALNRTGRPIVYSCEWPLYMWPFQKPNYTEIRQYCNHWRNFADIDDSWASIKSILDWTSRNQERIVDVAGPGGWNDPDMLVIGNFGLSWDQQVTQMALWAIMAGPLFMSNDLRAISPQAKALLQDKDVIAINQDPLGKQGYQLRKGDNFEVWERPLSGDAWAVAIINRQEIGGPRSYTIPVASLGKGVACNPACFITQLLPVKRKLGFYEHTSRLRSHINPTGTVLLQLENTMQTSLKDLL

SEQ ID NO: 1157 - DNA, 1194 bp, Artificial Sequence
  variant of human alpha-galactosidase A
ctggataatggattggctagaacacctcctatggggtggcttcactgggagaggttcatgtgcaacctggactgtcaggaagaaccagacagctgcatctccgagaagctctttgaggaaatggccgaacgaatggtgactgagggctggaaagatgcaggttacgagtatctgtgtattgacgattgctggatggccccacaacgggattctgagggaagacttcaggctgatccgcagcgcttccctcatggcataaggcagctggcaaaccacgtccacagtaaggggctcaaattgggaatctacgcggacgtgggcaataagacctgtgccggttttccgggatcattcgggtattatgacattgacgcccaaacgtttgctgattggggcgttgacctgctgaaattcgatggttgctactgtgacagcctcgaaaacctggcagacggctacaagcatatgtctctcgccctgaatagaaccggtcggccaatcgtatattcctgcgagtggcctctttacatgtggccatttcagaaaccgaactacacagaaattcgccagtattgcaatcattggaggaacttcgctgatatcgatgactcatgggcctccataaagagcatcttggactggaccagtcggaatcaggagcgaattgtggatgtcgcaggccctggaggatggaacgatccagacatgctggtgatcggcaattttggcctctcttgggaccagcaggttacccaaatggctctgtgggcaattatggccggtcctcttttcatgagcaacgatctgcgcgcgatctcaccacaggcaaaggccctgctccaagacaaagatgtgatagccatcaatcaggacccgttgggaaagcagggctaccagctgagaaaaggcgacaactttgaggtctgggaaaggcctttgagtggagatgcgtgggctgtggccattattaatcggcaagagatcggaggtccacgctcctatacaattcctgtagcatctcttggcaagggcgttgcctgtaacccagcttgcttcatcactcagcttctgccggtgaagagaaaactgggtttctacgaaattaccagcaggctccgatcccacatcaaccctacaggaaccgtcctcttgcagctggagaatacgatgcagacttcactgaaggacctcctg

SEQ ID NO: 1158 - protein, 398 aa, Artificial Sequence
  variant of human alpha-galactosidase A
LDNGLARTPPMGWLHWERFMCNLDCQEEPDSCISEKLFEEMAERMVTEGWKDAGYEYLCIDDCWMAPQRDSEGRLQADPQRFPHGIRQLANHVHSKGLKLGIYADVGNKTCAGFPGSFGYYDIDAQTFADWGVDLLKFDGCYCDSLENLADGYKHMSLALNRTGRPIVYSCEWPLYMWPFQKPNYTEIRQYCNHWRNFADIDDSWASIKSILDWTSRNQERIVDVAGPGGWNDPDMLVIGNFGLSWDQQVTQMALWAIMAGPLFMSNDLRAISPQAKALLQDKDVIAINQDPLGKQGYQLRKGDNFEVWERPLSGDAWAVAIINRQEIGGPRSYTIPVASLGKGVACNPACFITQLLPVKRKLGFYEITSRLRSHINPTGTVLLQLENTMQTSLKDLL

SEQ ID NO: 1159 - DNA, 1194 bp, Artificial Sequence
  variant of human alpha-galactosidase A
ctggataatggattggctagaacacctcctatggggtggcttcactgggagaggttcatgtgcaacctggactgtcaggaagaaccagacagctgcatctccgagaagctctttgaggaaatggccgaacgaatggtgactgagggctggaaagatgcaggttacgagtatctgtgtattgacgattgctggatggccccacaacgggattctgagggaagacttcaggctgatccgcagcgcttccctcatggcataaggcagctggcaaaccacgtccacagtaaggggctcaaattgggaatctacgcggacgtgggcaataagacctgtgccggttttccgggatcattcgggtattatgacattgacgcccaaacgtttgctgattggggcgttgacctgctgaaattcgatggttgctactgtgacagcctcgaaaacctggcagacggctacaagcatatgtctctcgccctgaatagaaccggtcggccaatcgtatattcctgcgagtggcctctttacatgtggccatttcagaaaccgaactacacagaaattcgccagtattgcaatcattggaggaacttcgctgatatcgatgactcatgggcctccataaagagcatcttggactggaccagtcggaatcaggagcgaattgtggatgtcgcaggccctggaggatggaacgatccagacatgctggtgatcggcaattttggcctctcttgggaccagcaggttacccaaatggctctgtgggcaattatggccggtcctcttttcatgagcaacgatctgcgcgcgatctcaccacaggcaaaggccctgctccaagacaaagatgtgatagccatcaatcaggacccgttgggaaagcagggctaccagctgagaaaaggcgacaactttgaggtctgggaaaggcctttgagtggagatgcgtgggctgtggccattattaatcggcaagagatcggaggtccacgctcctatacaattcctgtagcatctcttggcaagggcgttgcctgtaacccagcttgcttcatcactcagcttctgccggtgaagagaaaactgggtttctacgaaaagaccagcaggctccgatcccacatcaaccctacaggaaccgtcctcttgcagctggagaatacgatgcagacttcactgaaggacctcctg

SEQ ID NO: 1160 - protein, 398 aa, Artificial Sequence
  variant of human alpha-galactosidase A
LDNGLARTPPMGWLHWERFMCNLDCQEEPDSCISEKLFEEMAERMVTEGWKDAGYEYLCIDDCWMAPQRDSEGRLQADPQRFPHGIRQLANHVHSKGLKLGIYADVGNKTCAGFPGSFGYYDIDAQTFADWGVDLLKFDGCYCDSLENLADGYKHMSLALNRTGRPIVYSCEWPLYMWPFQKPNYTEIRQYCNHWRNFADIDDSWASIKSILDWTSRNQERIVDVAGPGGWNDPDMLVIGNFGLSWDQQVTQMALWAIMAGPLFMSNDLRAISPQAKALLQDKDVIAINQDPLGKQGYQLRKGDNFEVWERPLSGDAWAVAIINRQEIGGPRSYTIPVASLGKGVACNPACFITQLLPVKRKLGFYEKTSRLRSHINPTGTVLLQLENTMQTSLKDLL

SEQ ID NO: 1161 - DNA, 1194 bp, Artificial Sequence
  variant of human alpha-galactosidase A
ctggataatggattggctagaacacctcctatggggtggcttcactgggagaggttcatgtgcaacctggactgtcaggaagaaccagacagctgcatctccgagaagctctttgaggaaatggccgaacgaatggtgactgagggctggaaagatgcaggttacgagtatctgtgtattgacgattgctggatggccccacaacgggattctgagggaagacttcaggctgatccgcagcgcttccctcatggcataaggcagctggcaaaccacgtccacagtaaggggctcaaattgggaatctacgcggacgtgggcaataagacctgtgccggttttccgggatcattcgggtattatgacattgacgcccaaacgtttgctgattggggcgttgacctgctgaaattcgatggttgctactgtgacagcctcgaaaacctggcagacggctacaagcatatgtctctcgccctgaatagaaccggtcggccaatcgtatattcctgcgagtggcctctttacatgtggccatttcagaaaccgaactacacagaaattcgccagtattgcaatcattggaggaacttcgctgatatcgatgactcatgggcctccataaagagcatcttggactggaccagtcggaatcaggagcgaattgtggatgtcgcaggccctggaggatggaacgatccagacatgctggtgatcggcaattttggcctctcttgggaccagcaggttacccaaatggctctgtgggcaattatggccggtcctcttttcatgagcaacgatctgcgcgcgatctcaccacaggcaaaggccctgctccaagacaaagatgtgatagccatcaatcaggacccgttgggaaagcagggctaccagctgagaaaaggcgacaactttgaggtctgggaaaggcctttgagtggagatgcgtgggctgtggccattattaatcggcaagagatcggaggtccacgctcctatacaattcctgtagcatctcttggcaagggcgttgcctgtaacccagcttgcttcatcactcagcttctgccggtgaagagaaaactgggtttctacgaacttaccagcaggctccgatcccacatcaaccctacaggaaccgtcctcttgcagctggagaatacgatgcagacttcactgaaggacctcctg

SEQ ID NO: 1162 - protein, 398 aa, Artificial Sequence
  variant of human alpha-galactosidase A
LDNGLARTPPMGWLHWERFMCNLDCQEEPDSCISEKLFEEMAERMVTEGWKDAGYEYLCIDDCWMAPQRDSEGRLQADPQRFPHGIRQLANHVHSKGLKLGIYADVGNKTCAGFPGSFGYYDIDAQTFADWGVDLLKFDGCYCDSLENLADGYKHMSLALNRTGRPIVYSCEWPLYMWPFQKPNYTEIRQYCNHWRNFADIDDSWASIKSILDWTSRNQERIVDVAGPGGWNDPDMLVIGNFGLSWDQQVTQMALWAIMAGPLFMSNDLRAISPQAKALLQDKDVIAINQDPLGKQGYQLRKGDNFEVWERPLSGDAWAVAIINRQEIGGPRSYTIPVASLGKGVACNPACFITQLLPVKRKLGFYELTSRLRSHINPTGTVLLQLENTMQTSLKDLL

SEQ ID NO: 1163 - DNA, 1194 bp, Artificial Sequence
  variant of human alpha-galactosidase A
ctggataatggattggctagaacacctcctatggggtggcttcactgggagaggttcatgtgcaacctggactgtcaggaagaaccagacagctgcatctccgagaagctctttgaggaaatggccgaacgaatggtgactgagggctggaaagatgcaggttacgagtatctgtgtattgacgattgctggatggccccacaacgggattctgagggaagacttcaggctgatccgcagcgcttccctcatggcataaggcagctggcaaaccacgtccacagtaaggggctcaaattgggaatctacgcggacgtgggcaataagacctgtgccggttttccgggatcattcgggtattatgacattgacgcccaaacgtttgctgattggggcgttgacctgctgaaattcgatggttgctactgtgacagcctcgaaaacctggcagacggctacaagcatatgtctctcgccctgaatagaaccggtcggccaatcgtatattcctgcgagtggcctctttacatgtggccatttcagaaaccgaactacacagaaattcgccagtattgcaatcattggaggaacttcgctgatatcgatgactcatgggcctccataaagagcatcttggactggaccagtcggaatcaggagcgaattgtggatgtcgcaggccctggaggatggaacgatccagacatgctggtgatcggcaattttggcctctcttgggaccagcaggttacccaaatggctctgtgggcaattatggccggtcctcttttcatgagcaacgatctgcgcgcgatctcaccacaggcaaaggccctgctccaagacaaagatgtgatagccatcaatcaggacccgttgggaaagcagggctaccagctgagaaaaggcgacaactttgaggtctgggaaaggcctttgagtggagatgcgtgggctgtggccattattaatcggcaagagatcggaggtccacgctcctatacaattcctgtagcatctcttggcaagggcgttgcctgtaacccagcttgcttcatcactcagcttctgccggtgaagagaaaactgggtttctacgaaatgaccagcaggctccgatcccacatcaaccctacaggaaccgtcctcttgcagctggagaatacgatgcagacttcactgaaggacctcctg

SEQ ID NO: 1164 - protein, 398 aa, Artificial Sequence
  variant of human alpha-galactosidase A
LDNGLARTPPMGWLHWERFMCNLDCQEEPDSCISEKLFEEMAERMVTEGWKDAGYEYLCIDDCWMAPQRDSEGRLQADPQRFPHGIRQLANHVHSKGLKLGIYADVGNKTCAGFPGSFGYYDIDAQTFADWGVDLLKFDGCYCDSLENLADGYKHMSLALNRTGRPIVYSCEWPLYMWPFQKPNYTEIRQYCNHWRNFADIDDSWASIKSILDWTSRNQERIVDVAGPGGWNDPDMLVIGNFGLSWDQQVTQMALWAIMAGPLFMSNDLRAISPQAKALLQDKDVIAINQDPLGKQGYQLRKGDNFEVWERPLSGDAWAVAIINRQEIGGPRSYTIPVASLGKGVACNPACFITQLLPVKRKLGFYEMTSRLRSHINPTGTVLLQLENTMQTSLKDLL

SEQ ID NO: 1165 - DNA, 1194 bp, Artificial Sequence
  variant of human alpha-galactosidase A
ctggataatggattggctagaacacctcctatggggtggcttcactgggagaggttcatgtgcaacctggactgtcaggaagaaccagacagctgcatctccgagaagctctttgaggaaatggccgaacgaatggtgactgagggctggaaagatgcaggttacgagtatctgtgtattgacgattgctggatggccccacaacgggattctgagggaagacttcaggctgatccgcagcgcttccctcatggcataaggcagctggcaaaccacgtccacagtaaggggctcaaattgggaatctacgcggacgtgggcaataagacctgtgccggttttccgggatcattcgggtattatgacattgacgcccaaacgtttgctgattggggcgttgacctgctgaaattcgatggttgctactgtgacagcctcgaaaacctggcagacggctacaagcatatgtctctcgccctgaatagaaccggtcggccaatcgtatattcctgcgagtggcctctttacatgtggccatttcagaaaccgaactacacagaaattcgccagtattgcaatcattggaggaacttcgctgatatcgatgactcatgggcctccataaagagcatcttggactggaccagtcggaatcaggagcgaattgtggatgtcgcaggccctggaggatggaacgatccagacatgctggtgatcggcaattttggcctctcttgggaccagcaggttacccaaatggctctgtgggcaattatggccggtcctcttttcatgagcaacgatctgcgcgcgatctcaccacaggcaaaggccctgctccaagacaaagatgtgatagccatcaatcaggacccgttgggaaagcagggctaccagctgagaaaaggcgacaactttgaggtctgggaaaggcctttgagtggagatgcgtgggctgtggccattattaatcggcaagagatcggaggtccacgctcctatacaattcctgtagcatctcttggcaagggcgttgcctgtaacccagcttgcttcatcactcagcttctgccggtgaagagaaaactgggtttctacgaaaataccagcaggctccgatcccacatcaaccctacaggaaccgtcctcttgcagctggagaatacgatgcagacttcactgaaggacctcctg

SEQ ID NO: 1166 - protein, 398 aa, Artificial Sequence
  variant of human alpha-galactosidase A
LDNGLARTPPMGWLHWERFMCNLDCQEEPDSCISEKLFEEMAERMVTEGWKDAGYEYLCIDDCWMAPQRDSEGRLQADPQRFPHGIRQLANHVHSKGLKLGIYADVGNKTCAGFPGSFGYYDIDAQTFADWGVDLLKFDGCYCDSLENLADGYKHMSLALNRTGRPIVYSCEWPLYMWPFQKPNYTEIRQYCNHWRNFADIDDSWASIKSILDWTSRNQERIVDVAGPGGWNDPDMLVIGNFGLSWDQQVTQMALWAIMAGPLFMSNDLRAISPQAKALLQDKDVIAINQDPLGKQGYQLRKGDNFEVWERPLSGDAWAVAIINRQEIGGPRSYTIPVASLGKGVACNPACFITQLLPVKRKLGFYENTSRLRSHINPTGTVLLQLENTMQTSLKDLL

SEQ ID NO: 1167 - DNA, 1194 bp, Artificial Sequence
  variant of human alpha-galactosidase A
ctggataatggattggctagaacacctcctatggggtggcttcactgggagaggttcatgtgcaacctggactgtcaggaagaaccagacagctgcatctccgagaagctctttgaggaaatggccgaacgaatggtgactgagggctggaaagatgcaggttacgagtatctgtgtattgacgattgctggatggccccacaacgggattctgagggaagacttcaggctgatccgcagcgcttccctcatggcataaggcagctggcaaaccacgtccacagtaaggggctcaaattgggaatctacgcggacgtgggcaataagacctgtgccggttttccgggatcattcgggtattatgacattgacgcccaaacgtttgctgattggggcgttgacctgctgaaattcgatggttgctactgtgacagcctcgaaaacctggcagacggctacaagcatatgtctctcgccctgaatagaaccggtcggccaatcgtatattcctgcgagtggcctctttacatgtggccatttcagaaaccgaactacacagaaattcgccagtattgcaatcattggaggaacttcgctgatatcgatgactcatgggcctccataaagagcatcttggactggaccagtcggaatcaggagcgaattgtggatgtcgcaggccctggaggatggaacgatccagacatgctggtgatcggcaattttggcctctcttgggaccagcaggttacccaaatggctctgtgggcaattatggccggtcctcttttcatgagcaacgatctgcgcgcgatctcaccacaggcaaaggccctgctccaagacaaagatgtgatagccatcaatcaggacccgttgggaaagcagggctaccagctgagaaaaggcgacaactttgaggtctgggaaaggcctttgagtggagatgcgtgggctgtggccattattaatcggcaagagatcggaggtccacgctcctatacaattcctgtagcatctcttggcaagggcgttgcctgtaacccagcttgcttcatcactcagcttctgccggtgaagagaaaactgggtttctacgaacctaccagcaggctccgatcccacatcaaccctacaggaaccgtcctcttgcagctggagaatacgatgcagacttcactgaaggacctcctg

SEQ ID NO: 1168 - protein, 398 aa, Artificial Sequence
  variant of human alpha-galactosidase A
LDNGLARTPPMGWLHWERFMCNLDCQEEPDSCISEKLFEEMAERMVTEGWKDAGYEYLCIDDCWMAPQRDSEGRLQADPQRFPHGIRQLANHVHSKGLKLGIYADVGNKTCAGFPGSFGYYDIDAQTFADWGVDLLKFDGCYCDSLENLADGYKHMSLALNRTGRPIVYSCEWPLYMWPFQKPNYTEIRQYCNHWRNFADIDDSWASIKSILDWTSRNQERIVDVAGPGGWNDPDMLVIGNFGLSWDQQVTQMALWAIMAGPLFMSNDLRAISPQAKALLQDKDVIAINQDPLGKQGYQLRKGDNFEVWERPLSGDAWAVAIINRQEIGGPRSYTIPVASLGKGVACNPACFITQLLPVKRKLGFYEPTSRLRSHINPTGTVLLQLENTMQTSLKDLL

SEQ ID NO: 1169 - DNA, 1194 bp, Artificial Sequence
  variant of human alpha-galactosidase A
ctggataatggattggctagaacacctcctatggggtggcttcactgggagaggttcatgtgcaacctggactgtcaggaagaaccagacagctgcatctccgagaagctctttgaggaaatggccgaacgaatggtgactgagggctggaaagatgcaggttacgagtatctgtgtattgacgattgctggatggccccacaacgggattctgagggaagacttcaggctgatccgcagcgcttccctcatggcataaggcagctggcaaaccacgtccacagtaaggggctcaaattgggaatctacgcggacgtgggcaataagacctgtgccggttttccgggatcattcgggtattatgacattgacgcccaaacgtttgctgattggggcgttgacctgctgaaattcgatggttgctactgtgacagcctcgaaaacctggcagacggctacaagcatatgtctctcgccctgaatagaaccggtcggccaatcgtatattcctgcgagtggcctctttacatgtggccatttcagaaaccgaactacacagaaattcgccagtattgcaatcattggaggaacttcgctgatatcgatgactcatgggcctccataaagagcatcttggactggaccagtcggaatcaggagcgaattgtggatgtcgcaggccctggaggatggaacgatccagacatgctggtgatcggcaattttggcctctcttgggaccagcaggttacccaaatggctctgtgggcaattatggccggtcctcttttcatgagcaacgatctgcgcgcgatctcaccacaggcaaaggccctgctccaagacaaagatgtgatagccatcaatcaggacccgttgggaaagcagggctaccagctgagaaaaggcgacaactttgaggtctgggaaaggcctttgagtggagatgcgtgggctgtggccattattaatcggcaagagatcggaggtccacgctcctatacaattcctgtagcatctcttggcaagggcgttgcctgtaacccagcttgcttcatcactcagcttctgccggtgaagagaaaactgggtttctacgaacaaaccagcaggctccgatcccacatcaaccctacaggaaccgtcctcttgcagctggagaatacgatgcagacttcactgaaggacctcctg

SEQ ID NO: 1170 - protein, 398 aa, Artificial Sequence
  variant of human alpha-galactosidase A
LDNGLARTPPMGWLHWERFMCNLDCQEEPDSCISEKLFEEMAERMVTEGWKDAGYEYLCIDDCWMAPQRDSEGRLQADPQRFPHGIRQLANHVHSKGLKLGIYADVGNKTCAGFPGSFGYYDIDAQTFADWGVDLLKFDGCYCDSLENLADGYKHMSLALNRTGRPIVYSCEWPLYMWPFQKPNYTEIRQYCNHWRNFADIDDSWASIKSILDWTSRNQERIVDVAGPGGWNDPDMLVIGNFGLSWDQQVTQMALWAIMAGPLFMSNDLRAISPQAKALLQDKDVIAINQDPLGKQGYQLRKGDNFEVWERPLSGDAWAVAIINRQEIGGPRSYTIPVASLGKGVACNPACFITQLLPVKRKLGFYEQTSRLRSHINPTGTVLLQLENTMQTSLKDLL

SEQ ID NO: 1171 - DNA, 1194 bp, Artificial Sequence
  variant of human alpha-galactosidase A
ctggataatggattggctagaacacctcctatggggtggcttcactgggagaggttcatgtgcaacctggactgtcaggaagaaccagacagctgcatctccgagaagctctttgaggaaatggccgaacgaatggtgactgagggctggaaagatgcaggttacgagtatctgtgtattgacgattgctggatggccccacaacgggattctgagggaagacttcaggctgatccgcagcgcttccctcatggcataaggcagctggcaaaccacgtccacagtaaggggctcaaattgggaatctacgcggacgtgggcaataagacctgtgccggttttccgggatcattcgggtattatgacattgacgcccaaacgtttgctgattggggcgttgacctgctgaaattcgatggttgctactgtgacagcctcgaaaacctggcagacggctacaagcatatgtctctcgccctgaatagaaccggtcggccaatcgtatattcctgcgagtggcctctttacatgtggccatttcagaaaccgaactacacagaaattcgccagtattgcaatcattggaggaacttcgctgatatcgatgactcatgggcctccataaagagcatcttggactggaccagtcggaatcaggagcgaattgtggatgtcgcaggccctggaggatggaacgatccagacatgctggtgatcggcaattttggcctctcttgggaccagcaggttacccaaatggctctgtgggcaattatggccggtcctcttttcatgagcaacgatctgcgcgcgatctcaccacaggcaaaggccctgctccaagacaaagatgtgatagccatcaatcaggacccgttgggaaagcagggctaccagctgagaaaaggcgacaactttgaggtctgggaaaggcctttgagtggagatgcgtgggctgtggccattattaatcggcaagagatcggaggtccacgctcctatacaattcctgtagcatctcttggcaagggcgttgcctgtaacccagcttgcttcatcactcagcttctgccggtgaagagaaaactgggtttctacgaacggaccagcaggctccgatcccacatcaaccctacaggaaccgtcctcttgcagctggagaatacgatgcagacttcactgaaggacctcctg

SEQ ID NO: 1172 - protein, 398 aa, Artificial Sequence
  variant of human alpha-galactosidase A
LDNGLARTPPMGWLHWERFMCNLDCQEEPDSCISEKLFEEMAERMVTEGWKDAGYEYLCIDDCWMAPQRDSEGRLQADPQRFPHGIRQLANHVHSKGLKLGIYADVGNKTCAGFPGSFGYYDIDAQTFADWGVDLLKFDGCYCDSLENLADGYKHMSLALNRTGRPIVYSCEWPLYMWPFQKPNYTEIRQYCNHWRNFADIDDSWASIKSILDWTSRNQERIVDVAGPGGWNDPDMLVIGNFGLSWDQQVTQMALWAIMAGPLFMSNDLRAISPQAKALLQDKDVIAINQDPLGKQGYQLRKGDNFEVWERPLSGDAWAVAIINRQEIGGPRSYTIPVASLGKGVACNPACFITQLLPVKRKLGFYERTSRLRSHINPTGTVLLQLENTMQTSLKDLL

SEQ ID NO: 1173 - DNA, 1194 bp, Artificial Sequence
  variant of human alpha-galactosidase A
ctggataatggattggctagaacacctcctatggggtggcttcactgggagaggttcatgtgcaacctggactgtcaggaagaaccagacagctgcatctccgagaagctctttgaggaaatggccgaacgaatggtgactgagggctggaaagatgcaggttacgagtatctgtgtattgacgattgctggatggccccacaacgggattctgagggaagacttcaggctgatccgcagcgcttccctcatggcataaggcagctggcaaaccacgtccacagtaaggggctcaaattgggaatctacgcggacgtgggcaataagacctgtgccggttttccgggatcattcgggtattatgacattgacgcccaaacgtttgctgattggggcgttgacctgctgaaattcgatggttgctactgtgacagcctcgaaaacctggcagacggctacaagcatatgtctctcgccctgaatagaaccggtcggccaatcgtatattcctgcgagtggcctctttacatgtggccatttcagaaaccgaactacacagaaattcgccagtattgcaatcattggaggaacttcgctgatatcgatgactcatgggcctccataaagagcatcttggactggaccagtcggaatcaggagcgaattgtggatgtcgcaggccctggaggatggaacgatccagacatgctggtgatcggcaattttggcctctcttgggaccagcaggttacccaaatggctctgtgggcaattatggccggtcctcttttcatgagcaacgatctgcgcgcgatctcaccacaggcaaaggccctgctccaagacaaagatgtgatagccatcaatcaggacccgttgggaaagcagggctaccagctgagaaaaggcgacaactttgaggtctgggaaaggcctttgagtggagatgcgtgggctgtggccattattaatcggcaagagatcggaggtccacgctcctatacaattcctgtagcatctcttggcaagggcgttgcctgtaacccagcttgcttcatcactcagcttctgccggtgaagagaaaactgggtttctacgaaagtaccagcaggctccgatcccacatcaaccctacaggaaccgtcctcttgcagctggagaatacgatgcagacttcactgaaggacctcctg

SEQ ID NO: 1174 - protein, 398 aa, Artificial Sequence
  variant of human alpha-galactosidase A
LDNGLARTPPMGWLHWERFMCNLDCQEEPDSCISEKLFEEMAERMVTEGWKDAGYEYLCIDDCWMAPQRDSEGRLQADPQRFPHGIRQLANHVHSKGLKLGIYADVGNKTCAGFPGSFGYYDIDAQTFADWGVDLLKFDGCYCDSLENLADGYKHMSLALNRTGRPIVYSCEWPLYMWPFQKPNYTEIRQYCNHWRNFADIDDSWASIKSILDWTSRNQERIVDVAGPGGWNDPDMLVIGNFGLSWDQQVTQMALWAIMAGPLFMSNDLRAISPQAKALLQDKDVIAINQDPLGKQGYQLRKGDNFEVWERPLSGDAWAVAIINRQEIGGPRSYTIPVASLGKGVACNPACFITQLLPVKRKLGFYESTSRLRSHINPTGTVLLQLENTMQTSLKDLL

SEQ ID NO: 1175 - DNA, 1194 bp, Artificial Sequence
  variant of human alpha-galactosidase A
ctggataatggattggctagaacacctcctatggggtggcttcactgggagaggttcatgtgcaacctggactgtcaggaagaaccagacagctgcatctccgagaagctctttgaggaaatggccgaacgaatggtgactgagggctggaaagatgcaggttacgagtatctgtgtattgacgattgctggatggccccacaacgggattctgagggaagacttcaggctgatccgcagcgcttccctcatggcataaggcagctggcaaaccacgtccacagtaaggggctcaaattgggaatctacgcggacgtgggcaataagacctgtgccggttttccgggatcattcgggtattatgacattgacgcccaaacgtttgctgattggggcgttgacctgctgaaattcgatggttgctactgtgacagcctcgaaaacctggcagacggctacaagcatatgtctctcgccctgaatagaaccggtcggccaatcgtatattcctgcgagtggcctctttacatgtggccatttcagaaaccgaactacacagaaattcgccagtattgcaatcattggaggaacttcgctgatatcgatgactcatgggcctccataaagagcatcttggactggaccagtcggaatcaggagcgaattgtggatgtcgcaggccctggaggatggaacgatccagacatgctggtgatcggcaattttggcctctcttgggaccagcaggttacccaaatggctctgtgggcaattatggccggtcctcttttcatgagcaacgatctgcgcgcgatctcaccacaggcaaaggccctgctccaagacaaagatgtgatagccatcaatcaggacccgttgggaaagcagggctaccagctgagaaaaggcgacaactttgaggtctgggaaaggcctttgagtggagatgcgtgggctgtggccattattaatcggcaagagatcggaggtccacgctcctatacaattcctgtagcatctcttggcaagggcgttgcctgtaacccagcttgcttcatcactcagcttctgccggtgaagagaaaactgggtttctacgaaacgaccagcaggctccgatcccacatcaaccctacaggaaccgtcctcttgcagctggagaatacgatgcagacttcactgaaggacctcctg

SEQ ID NO: 1176 - protein, 398 aa, Artificial Sequence
  variant of human alpha-galactosidase A
LDNGLARTPPMGWLHWERFMCNLDCQEEPDSCISEKLFEEMAERMVTEGWKDAGYEYLCIDDCWMAPQRDSEGRLQADPQRFPHGIRQLANHVHSKGLKLGIYADVGNKTCAGFPGSFGYYDIDAQTFADWGVDLLKFDGCYCDSLENLADGYKHMSLALNRTGRPIVYSCEWPLYMWPFQKPNYTEIRQYCNHWRNFADIDDSWASIKSILDWTSRNQERIVDVAGPGGWNDPDMLVIGNFGLSWDQQVTQMALWAIMAGPLFMSNDLRAISPQAKALLQDKDVIAINQDPLGKQGYQLRKGDNFEVWERPLSGDAWAVAIINRQEIGGPRSYTIPVASLGKGVACNPACFITQLLPVKRKLGFYETTSRLRSHINPTGTVLLQLENTMQTSLKDLL

SEQ ID NO: 1177 - DNA, 1194 bp, Artificial Sequence
  variant of human alpha-galactosidase A
ctggataatggattggctagaacacctcctatggggtggcttcactgggagaggttcatgtgcaacctggactgtcaggaagaaccagacagctgcatctccgagaagctctttgaggaaatggccgaacgaatggtgactgagggctggaaagatgcaggttacgagtatctgtgtattgacgattgctggatggccccacaacgggattctgagggaagacttcaggctgatccgcagcgcttccctcatggcataaggcagctggcaaaccacgtccacagtaaggggctcaaattgggaatctacgcggacgtgggcaataagacctgtgccggttttccgggatcattcgggtattatgacattgacgcccaaacgtttgctgattggggcgttgacctgctgaaattcgatggttgctactgtgacagcctcgaaaacctggcagacggctacaagcatatgtctctcgccctgaatagaaccggtcggccaatcgtatattcctgcgagtggcctctttacatgtggccatttcagaaaccgaactacacagaaattcgccagtattgcaatcattggaggaacttcgctgatatcgatgactcatgggcctccataaagagcatcttggactggaccagtcggaatcaggagcgaattgtggatgtcgcaggccctggaggatggaacgatccagacatgctggtgatcggcaattttggcctctcttgggaccagcaggttacccaaatggctctgtgggcaattatggccggtcctcttttcatgagcaacgatctgcgcgcgatctcaccacaggcaaaggccctgctccaagacaaagatgtgatagccatcaatcaggacccgttgggaaagcagggctaccagctgagaaaaggcgacaactttgaggtctgggaaaggcctttgagtggagatgcgtgggctgtggccattattaatcggcaagagatcggaggtccacgctcctatacaattcctgtagcatctcttggcaagggcgttgcctgtaacccagcttgcttcatcactcagcttctgccggtgaagagaaaactgggtttctacgaagtgaccagcaggctccgatcccacatcaaccctacaggaaccgtcctcttgcagctggagaatacgatgcagacttcactgaaggacctcctg

SEQ ID NO: 1178 - protein, 398 aa, Artificial Sequence
  variant of human alpha-galactosidase A
LDNGLARTPPMGWLHWERFMCNLDCQEEPDSCISEKLFEEMAERMVTEGWKDAGYEYLCIDDCWMAPQRDSEGRLQADPQRFPHGIRQLANHVHSKGLKLGIYADVGNKTCAGFPGSFGYYDIDAQTFADWGVDLLKFDGCYCDSLENLADGYKHMSLALNRTGRPIVYSCEWPLYMWPFQKPNYTEIRQYCNHWRNFADIDDSWASIKSILDWTSRNQERIVDVAGPGGWNDPDMLVIGNFGLSWDQQVTQMALWAIMAGPLFMSNDLRAISPQAKALLQDKDVIAINQDPLGKQGYQLRKGDNFEVWERPLSGDAWAVAIINRQEIGGPRSYTIPVASLGKGVACNPACFITQLLPVKRKLGFYEVTSRLRSHINPTGTVLLQLENTMQTSLKDLL

SEQ ID NO: 1179 - DNA, 1194 bp, Artificial Sequence
  variant of human alpha-galactosidase A
ctggataatggattggctagaacacctcctatggggtggcttcactgggagaggttcatgtgcaacctggactgtcaggaagaaccagacagctgcatctccgagaagctctttgaggaaatggccgaacgaatggtgactgagggctggaaagatgcaggttacgagtatctgtgtattgacgattgctggatggccccacaacgggattctgagggaagacttcaggctgatccgcagcgcttccctcatggcataaggcagctggcaaaccacgtccacagtaaggggctcaaattgggaatctacgcggacgtgggcaataagacctgtgccggttttccgggatcattcgggtattatgacattgacgcccaaacgtttgctgattggggcgttgacctgctgaaattcgatggttgctactgtgacagcctcgaaaacctggcagacggctacaagcatatgtctctcgccctgaatagaaccggtcggccaatcgtatattcctgcgagtggcctctttacatgtggccatttcagaaaccgaactacacagaaattcgccagtattgcaatcattggaggaacttcgctgatatcgatgactcatgggcctccataaagagcatcttggactggaccagtcggaatcaggagcgaattgtggatgtcgcaggccctggaggatggaacgatccagacatgctggtgatcggcaattttggcctctcttgggaccagcaggttacccaaatggctctgtgggcaattatggccggtcctcttttcatgagcaacgatctgcgcgcgatctcaccacaggcaaaggccctgctccaagacaaagatgtgatagccatcaatcaggacccgttgggaaagcagggctaccagctgagaaaaggcgacaactttgaggtctgggaaaggcctttgagtggagatgcgtgggctgtggccattattaatcggcaagagatcggaggtccacgctcctatacaattcctgtagcatctcttggcaagggcgttgcctgtaacccagcttgcttcatcactcagcttctgccggtgaagagaaaactgggtttctacgaatggaccagcaggctccgatcccacatcaaccctacaggaaccgtcctcttgcagctggagaatacgatgcagacttcactgaaggacctcctg

SEQ ID NO: 1180 - protein, 398 aa, Artificial Sequence
  variant of human alpha-galactosidase A
LDNGLARTPPMGWLHWERFMCNLDCQEEPDSCISEKLFEEMAERMVTEGWKDAGYEYLCIDDCWMAPQRDSEGRLQADPQRFPHGIRQLANHVHSKGLKLGIYADVGNKTCAGFPGSFGYYDIDAQTFADWGVDLLKFDGCYCDSLENLADGYKHMSLALNRTGRPIVYSCEWPLYMWPFQKPNYTEIRQYCNHWRNFADIDDSWASIKSILDWTSRNQERIVDVAGPGGWNDPDMLVIGNFGLSWDQQVTQMALWAIMAGPLFMSNDLRAISPQAKALLQDKDVIAINQDPLGKQGYQLRKGDNFEVWERPLSGDAWAVAIINRQEIGGPRSYTIPVASLGKGVACNPACFITQLLPVKRKLGFYEWTSRLRSHINPTGTVLLQLENTMQTSLKDLL

SEQ ID NO: 1181 - DNA, 1194 bp, Artificial Sequence
  variant of human alpha-galactosidase A
ctggataatggattggctagaacacctcctatggggtggcttcactgggagaggttcatgtgcaacctggactgtcaggaagaaccagacagctgcatctccgagaagctctttgaggaaatggccgaacgaatggtgactgagggctggaaagatgcaggttacgagtatctgtgtattgacgattgctggatggccccacaacgggattctgagggaagacttcaggctgatccgcagcgcttccctcatggcataaggcagctggcaaaccacgtccacagtaaggggctcaaattgggaatctacgcggacgtgggcaataagacctgtgccggttttccgggatcattcgggtattatgacattgacgcccaaacgtttgctgattggggcgttgacctgctgaaattcgatggttgctactgtgacagcctcgaaaacctggcagacggctacaagcatatgtctctcgccctgaatagaaccggtcggccaatcgtatattcctgcgagtggcctctttacatgtggccatttcagaaaccgaactacacagaaattcgccagtattgcaatcattggaggaacttcgctgatatcgatgactcatgggcctccataaagagcatcttggactggaccagtcggaatcaggagcgaattgtggatgtcgcaggccctggaggatggaacgatccagacatgctggtgatcggcaattttggcctctcttgggaccagcaggttacccaaatggctctgtgggcaattatggccggtcctcttttcatgagcaacgatctgcgcgcgatctcaccacaggcaaaggccctgctccaagacaaagatgtgatagccatcaatcaggacccgttgggaaagcagggctaccagctgagaaaaggcgacaactttgaggtctgggaaaggcctttgagtggagatgcgtgggctgtggccattattaatcggcaagagatcggaggtccacgctcctatacaattcctgtagcatctcttggcaagggcgttgcctgtaacccagcttgcttcatcactcagcttctgccggtgaagagaaaactgggtttctacgaatataccagcaggctccgatcccacatcaaccctacaggaaccgtcctcttgcagctggagaatacgatgcagacttcactgaaggacctcctg

SEQ ID NO: 1182 - protein, 398 aa, Artificial Sequence
  variant of human alpha-galactosidase A
LDNGLARTPPMGWLHWERFMCNLDCQEEPDSCISEKLFEEMAERMVTEGWKDAGYEYLCIDDCWMAPQRDSEGRLQADPQRFPHGIRQLANHVHSKGLKLGIYADVGNKTCAGFPGSFGYYDIDAQTFADWGVDLLKFDGCYCDSLENLADGYKHMSLALNRTGRPIVYSCEWPLYMWPFQKPNYTEIRQYCNHWRNFADIDDSWASIKSILDWTSRNQERIVDVAGPGGWNDPDMLVIGNFGLSWDQQVTQMALWAIMAGPLFMSNDLRAISPQAKALLQDKDVIAINQDPLGKQGYQLRKGDNFEVWERPLSGDAWAVAIINRQEIGGPRSYTIPVASLGKGVACNPACFITQLLPVKRKLGFYEYTSRLRSHINPTGTVLLQLENTMQTSLKDLL

SEQ ID NO: 1183 - DNA, 1194 bp, Artificial Sequence
  variant of human alpha-galactosidase A
ctggataatggattggctagaacacctcctatggggtggcttcactgggagaggttcatgtgcaacctggactgtcaggaagaaccagacagctgcatctccgagaagctctttgaggaaatggccgaacgaatggtgactgagggctggaaagatgcaggttacgagtatctgtgtattgacgattgctggatggccccacaacgggattctgagggaagacttcaggctgatccgcagcgcttccctcatggcataaggcagctggcaaaccacgtccacagtaaggggctcaaattgggaatctacgcggacgtgggcaataagacctgtgccggttttccgggatcattcgggtattatgacattgacgcccaaacgtttgctgattggggcgttgacctgctgaaattcgatggttgctactgtgacagcctcgaaaacctggcagacggctacaagcatatgtctctcgccctgaatagaaccggtcggccaatcgtatattcctgcgagtggcctctttacatgtggccatttcagaaaccgaactacacagaaattcgccagtattgcaatcattggaggaacttcgctgatatcgatgactcatgggcctccataaagagcatcttggactggaccagtcggaatcaggagcgaattgtggatgtcgcaggccctggaggatggaacgatccagacatgctggtgatcggcaattttggcctctcttgggctcagcaggttacccaaatggctctgtgggcaattatggccggtcctcttttcatgagcaacgatctgcgcgcgatctcaccacaggcaaaggccctgctccaagacaaagatgtgatagccatcaatcaggacccgttgggaaagcagggctaccagctgagaaaaggcgacaactttgaggtctgggaaaggcctttgagtggagatgcgtgggctgtggccattattaatcggcaagagatcggaggtccacgctcctatacaattcctgtagcatctcttggcaagggcgttgcctgtaacccagcttgcttcatcactcagcttctgccggtgaagagaaaactgggtttctacgaagctaccagcaggctccgatcccacatcaaccctacaggaaccgtcctcttgcagctggagaatacgatgcagacttcactgaaggacctcctg

SEQ ID NO: 1184 - protein, 398 aa, Artificial Sequence
  variant of human alpha-galactosidase A
LDNGLARTPPMGWLHWERFMCNLDCQEEPDSCISEKLFEEMAERMVTEGWKDAGYEYLCIDDCWMAPQRDSEGRLQADPQRFPHGIRQLANHVHSKGLKLGIYADVGNKTCAGFPGSFGYYDIDAQTFADWGVDLLKFDGCYCDSLENLADGYKHMSLALNRTGRPIVYSCEWPLYMWPFQKPNYTEIRQYCNHWRNFADIDDSWASIKSILDWTSRNQERIVDVAGPGGWNDPDMLVIGNFGLSWAQQVTQMALWAIMAGPLFMSNDLRAISPQAKALLQDKDVIAINQDPLGKQGYQLRKGDNFEVWERPLSGDAWAVAIINRQEIGGPRSYTIPVASLGKGVACNPACFITQLLPVKRKLGFYEATSRLRSHINPTGTVLLQLENTMQTSLKDLL

SEQ ID NO: 1185 - DNA, 1194 bp, Artificial Sequence
  variant of human alpha-galactosidase A
ctggataatggattggctagaacacctcctatggggtggcttcactgggagaggttcatgtgcaacctggactgtcaggaagaaccagacagctgcatctccgagaagctctttgaggaaatggccgaacgaatggtgactgagggctggaaagatgcaggttacgagtatctgtgtattgacgattgctggatggccccacaacgggattctgagggaagacttcaggctgatccgcagcgcttccctcatggcataaggcagctggcaaaccacgtccacagtaaggggctcaaattgggaatctacgcggacgtgggcaataagacctgtgccggttttccgggatcattcgggtattatgacattgacgcccaaacgtttgctgattggggcgttgacctgctgaaattcgatggttgctactgtgacagcctcgaaaacctggcagacggctacaagcatatgtctctcgccctgaatagaaccggtcggccaatcgtatattcctgcgagtggcctctttacatgtggccatttcagaaaccgaactacacagaaattcgccagtattgcaatcattggaggaacttcgctgatatcgatgactcatgggcctccataaagagcatcttggactggaccagtcggaatcaggagcgaattgtggatgtcgcaggccctggaggatggaacgatccagacatgctggtgatcggcaattttggcctctcttggtgtcagcaggttacccaaatggctctgtgggcaattatggccggtcctcttttcatgagcaacgatctgcgcgcgatctcaccacaggcaaaggccctgctccaagacaaagatgtgatagccatcaatcaggacccgttgggaaagcagggctaccagctgagaaaaggcgacaactttgaggtctgggaaaggcctttgagtggagatgcgtgggctgtggccattattaatcggcaagagatcggaggtccacgctcctatacaattcctgtagcatctcttggcaagggcgttgcctgtaacccagcttgcttcatcactcagcttctgccggtgaagagaaaactgggtttctacgaagctaccagcaggctccgatcccacatcaaccctacaggaaccgtcctcttgcagctggagaatacgatgcagacttcactgaaggacctcctg

SEQ ID NO: 1186 - protein, 398 aa, Artificial Sequence
  variant of human alpha-galactosidase A
LDNGLARTPPMGWLHWERFMCNLDCQEEPDSCISEKLFEEMAERMVTEGWKDAGYEYLCIDDCWMAPQRDSEGRLQADPQRFPHGIRQLANHVHSKGLKLGIYADVGNKTCAGFPGSFGYYDIDAQTFADWGVDLLKFDGCYCDSLENLADGYKHMSLALNRTGRPIVYSCEWPLYMWPFQKPNYTEIRQYCNHWRNFADIDDSWASIKSILDWTSRNQERIVDVAGPGGWNDPDMLVIGNFGLSWCQQVTQMALWAIMAGPLFMSNDLRAISPQAKALLQDKDVIAINQDPLGKQGYQLRKGDNFEVWERPLSGDAWAVAIINRQEIGGPRSYTIPVASLGKGVACNPACFITQLLPVKRKLGFYEATSRLRSHINPTGTVLLQLENTMQTSLKDLL

SEQ ID NO: 1187 - DNA, 1194 bp, Artificial Sequence
  variant of human alpha-galactosidase A
ctggataatggattggctagaacacctcctatggggtggcttcactgggagaggttcatgtgcaacctggactgtcaggaagaaccagacagctgcatctccgagaagctctttgaggaaatggccgaacgaatggtgactgagggctggaaagatgcaggttacgagtatctgtgtattgacgattgctggatggccccacaacgggattctgagggaagacttcaggctgatccgcagcgcttccctcatggcataaggcagctggcaaaccacgtccacagtaaggggctcaaattgggaatctacgcggacgtgggcaataagacctgtgccggttttccgggatcattcgggtattatgacattgacgcccaaacgtttgctgattggggcgttgacctgctgaaattcgatggttgctactgtgacagcctcgaaaacctggcagacggctacaagcatatgtctctcgccctgaatagaaccggtcggccaatcgtatattcctgcgagtggcctctttacatgtggccatttcagaaaccgaactacacagaaattcgccagtattgcaatcattggaggaacttcgctgatatcgatgactcatgggcctccataaagagcatcttggactggaccagtcggaatcaggagcgaattgtggatgtcgcaggccctggaggatggaacgatccagacatgctggtgatcggcaattttggcctctcttgggagcagcaggttacccaaatggctctgtgggcaattatggccggtcctcttttcatgagcaacgatctgcgcgcgatctcaccacaggcaaaggccctgctccaagacaaagatgtgatagccatcaatcaggacccgttgggaaagcagggctaccagctgagaaaaggcgacaactttgaggtctgggaaaggcctttgagtggagatgcgtgggctgtggccattattaatcggcaagagatcggaggtccacgctcctatacaattcctgtagcatctcttggcaagggcgttgcctgtaacccagcttgcttcatcactcagcttctgccggtgaagagaaaactgggtttctacgaagctaccagcaggctccgatcccacatcaaccctacaggaaccgtcctcttgcagctggagaatacgatgcagacttcactgaaggacctcctg

SEQ ID NO: 1188 - protein, 398 aa, Artificial Sequence
  variant of human alpha-galactosidase A
LDNGLARTPPMGWLHWERFMCNLDCQEEPDSCISEKLFEEMAERMVTEGWKDAGYEYLCIDDCWMAPQRDSEGRLQADPQRFPHGIRQLANHVHSKGLKLGIYADVGNKTCAGFPGSFGYYDIDAQTFADWGVDLLKFDGCYCDSLENLADGYKHMSLALNRTGRPIVYSCEWPLYMWPFQKPNYTEIRQYCNHWRNFADIDDSWASIKSILDWTSRNQERIVDVAGPGGWNDPDMLVIGNFGLSWEQQVTQMALWAIMAGPLFMSNDLRAISPQAKALLQDKDVIAINQDPLGKQGYQLRKGDNFEVWERPLSGDAWAVAIINRQEIGGPRSYTIPVASLGKGVACNPACFITQLLPVKRKLGFYEATSRLRSHINPTGTVLLQLENTMQTSLKDLL

SEQ ID NO: 1189 - DNA, 1194 bp, Artificial Sequence
  variant of human alpha-galactosidase A
ctggataatggattggctagaacacctcctatggggtggcttcactgggagaggttcatgtgcaacctggactgtcaggaagaaccagacagctgcatctccgagaagctctttgaggaaatggccgaacgaatggtgactgagggctggaaagatgcaggttacgagtatctgtgtattgacgattgctggatggccccacaacgggattctgagggaagacttcaggctgatccgcagcgcttccctcatggcataaggcagctggcaaaccacgtccacagtaaggggctcaaattgggaatctacgcggacgtgggcaataagacctgtgccggttttccgggatcattcgggtattatgacattgacgcccaaacgtttgctgattggggcgttgacctgctgaaattcgatggttgctactgtgacagcctcgaaaacctggcagacggctacaagcatatgtctctcgccctgaatagaaccggtcggccaatcgtatattcctgcgagtggcctctttacatgtggccatttcagaaaccgaactacacagaaattcgccagtattgcaatcattggaggaacttcgctgatatcgatgactcatgggcctccataaagagcatcttggactggaccagtcggaatcaggagcgaattgtggatgtcgcaggccctggaggatggaacgatccagacatgctggtgatcggcaattttggcctctcttggtttcagcaggttacccaaatggctctgtgggcaattatggccggtcctcttttcatgagcaacgatctgcgcgcgatctcaccacaggcaaaggccctgctccaagacaaagatgtgatagccatcaatcaggacccgttgggaaagcagggctaccagctgagaaaaggcgacaactttgaggtctgggaaaggcctttgagtggagatgcgtgggctgtggccattattaatcggcaagagatcggaggtccacgctcctatacaattcctgtagcatctcttggcaagggcgttgcctgtaacccagcttgcttcatcactcagcttctgccggtgaagagaaaactgggtttctacgaagctaccagcaggctccgatcccacatcaaccctacaggaaccgtcctcttgcagctggagaatacgatgcagacttcactgaaggacctcctg

SEQ ID NO: 1190 - protein, 398 aa, Artificial Sequence
  variant of human alpha-galactosidase A
LDNGLARTPPMGWLHWERFMCNLDCQEEPDSCISEKLFEEMAERMVTEGWKDAGYEYLCIDDCWMAPQRDSEGRLQADPQRFPHGIRQLANHVHSKGLKLGIYADVGNKTCAGFPGSFGYYDIDAQTFADWGVDLLKFDGCYCDSLENLADGYKHMSLALNRTGRPIVYSCEWPLYMWPFQKPNYTEIRQYCNHWRNFADIDDSWASIKSILDWTSRNQERIVDVAGPGGWNDPDMLVIGNFGLSWFQQVTQMALWAIMAGPLFMSNDLRAISPQAKALLQDKDVIAINQDPLGKQGYQLRKGDNFEVWERPLSGDAWAVAIINRQEIGGPRSYTIPVASLGKGVACNPACFITQLLPVKRKLGFYEATSRLRSHINPTGTVLLQLENTMQTSLKDLL

SEQ ID NO: 1191 - DNA, 1194 bp, Artificial Sequence
  variant of human alpha-galactosidase A
ctggataatggattggctagaacacctcctatggggtggcttcactgggagaggttcatgtgcaacctggactgtcaggaagaaccagacagctgcatctccgagaagctctttgaggaaatggccgaacgaatggtgactgagggctggaaagatgcaggttacgagtatctgtgtattgacgattgctggatggccccacaacgggattctgagggaagacttcaggctgatccgcagcgcttccctcatggcataaggcagctggcaaaccacgtccacagtaaggggctcaaattgggaatctacgcggacgtgggcaataagacctgtgccggttttccgggatcattcgggtattatgacattgacgcccaaacgtttgctgattggggcgttgacctgctgaaattcgatggttgctactgtgacagcctcgaaaacctggcagacggctacaagcatatgtctctcgccctgaatagaaccggtcggccaatcgtatattcctgcgagtggcctctttacatgtggccatttcagaaaccgaactacacagaaattcgccagtattgcaatcattggaggaacttcgctgatatcgatgactcatgggcctccataaagagcatcttggactggaccagtcggaatcaggagcgaattgtggatgtcgcaggccctggaggatggaacgatccagacatgctggtgatcggcaattttggcctctcttgggggcagcaggttacccaaatggctctgtgggcaattatggccggtcctcttttcatgagcaacgatctgcgcgcgatctcaccacaggcaaaggccctgctccaagacaaagatgtgatagccatcaatcaggacccgttgggaaagcagggctaccagctgagaaaaggcgacaactttgaggtctgggaaaggcctttgagtggagatgcgtgggctgtggccattattaatcggcaagagatcggaggtccacgctcctatacaattcctgtagcatctcttggcaagggcgttgcctgtaacccagcttgcttcatcactcagcttctgccggtgaagagaaaactgggtttctacgaagctaccagcaggctccgatcccacatcaaccctacaggaaccgtcctcttgcagctggagaatacgatgcagacttcactgaaggacctcctg

SEQ ID NO: 1192 - protein, 398 aa, Artificial Sequence
  variant of human alpha-galactosidase A
LDNGLARTPPMGWLHWERFMCNLDCQEEPDSCISEKLFEEMAERMVTEGWKDAGYEYLCIDDCWMAPQRDSEGRLQADPQRFPHGIRQLANHVHSKGLKLGIYADVGNKTCAGFPGSFGYYDIDAQTFADWGVDLLKFDGCYCDSLENLADGYKHMSLALNRTGRPIVYSCEWPLYMWPFQKPNYTEIRQYCNHWRNFADIDDSWASIKSILDWTSRNQERIVDVAGPGGWNDPDMLVIGNFGLSWGQQVTQMALWAIMAGPLFMSNDLRAISPQAKALLQDKDVIAINQDPLGKQGYQLRKGDNFEVWERPLSGDAWAVAIINRQEIGGPRSYTIPVASLGKGVACNPACFITQLLPVKRKLGFYEATSRLRSHINPTGTVLLQLENTMQTSLKDLL

SEQ ID NO: 1193 - DNA, 1194 bp, Artificial Sequence
  variant of human alpha-galactosidase A
ctggataatggattggctagaacacctcctatggggtggcttcactgggagaggttcatgtgcaacctggactgtcaggaagaaccagacagctgcatctccgagaagctctttgaggaaatggccgaacgaatggtgactgagggctggaaagatgcaggttacgagtatctgtgtattgacgattgctggatggccccacaacgggattctgagggaagacttcaggctgatccgcagcgcttccctcatggcataaggcagctggcaaaccacgtccacagtaaggggctcaaattgggaatctacgcggacgtgggcaataagacctgtgccggttttccgggatcattcgggtattatgacattgacgcccaaacgtttgctgattggggcgttgacctgctgaaattcgatggttgctactgtgacagcctcgaaaacctggcagacggctacaagcatatgtctctcgccctgaatagaaccggtcggccaatcgtatattcctgcgagtggcctctttacatgtggccatttcagaaaccgaactacacagaaattcgccagtattgcaatcattggaggaacttcgctgatatcgatgactcatgggcctccataaagagcatcttggactggaccagtcggaatcaggagcgaattgtggatgtcgcaggccctggaggatggaacgatccagacatgctggtgatcggcaattttggcctctcttggcatcagcaggttacccaaatggctctgtgggcaattatggccggtcctcttttcatgagcaacgatctgcgcgcgatctcaccacaggcaaaggccctgctccaagacaaagatgtgatagccatcaatcaggacccgttgggaaagcagggctaccagctgagaaaaggcgacaactttgaggtctgggaaaggcctttgagtggagatgcgtgggctgtggccattattaatcggcaagagatcggaggtccacgctcctatacaattcctgtagcatctcttggcaagggcgttgcctgtaacccagcttgcttcatcactcagcttctgccggtgaagagaaaactgggtttctacgaagctaccagcaggctccgatcccacatcaaccctacaggaaccgtcctcttgcagctggagaatacgatgcagacttcactgaaggacctcctg

SEQ ID NO: 1194 - protein, 398 aa, Artificial Sequence
  variant of human alpha-galactosidase A
LDNGLARTPPMGWLHWERFMCNLDCQEEPDSCISEKLFEEMAERMVTEGWKDAGYEYLCIDDCWMAPQRDSEGRLQADPQRFPHGIRQLANHVHSKGLKLGIYADVGNKTCAGFPGSFGYYDIDAQTFADWGVDLLKFDGCYCDSLENLADGYKHMSLALNRTGRPIVYSCEWPLYMWPFQKPNYTEIRQYCNHWRNFADIDDSWASIKSILDWTSRNQERIVDVAGPGGWNDPDMLVIGNFGLSWHQQVTQMALWAIMAGPLFMSNDLRAISPQAKALLQDKDVIAINQDPLGKQGYQLRKGDNFEVWERPLSGDAWAVAIINRQEIGGPRSYTIPVASLGKGVACNPACFITQLLPVKRKLGFYEATSRLRSHINPTGTVLLQLENTMQTSLKDLL

SEQ ID NO: 1195 - DNA, 1194 bp, Artificial Sequence
  variant of human alpha-galactosidase A
ctggataatggattggctagaacacctcctatggggtggcttcactgggagaggttcatgtgcaacctggactgtcaggaagaaccagacagctgcatctccgagaagctctttgaggaaatggccgaacgaatggtgactgagggctggaaagatgcaggttacgagtatctgtgtattgacgattgctggatggccccacaacgggattctgagggaagacttcaggctgatccgcagcgcttccctcatggcataaggcagctggcaaaccacgtccacagtaaggggctcaaattgggaatctacgcggacgtgggcaataagacctgtgccggttttccgggatcattcgggtattatgacattgacgcccaaacgtttgctgattggggcgttgacctgctgaaattcgatggttgctactgtgacagcctcgaaaacctggcagacggctacaagcatatgtctctcgccctgaatagaaccggtcggccaatcgtatattcctgcgagtggcctctttacatgtggccatttcagaaaccgaactacacagaaattcgccagtattgcaatcattggaggaacttcgctgatatcgatgactcatgggcctccataaagagcatcttggactggaccagtcggaatcaggagcgaattgtggatgtcgcaggccctggaggatggaacgatccagacatgctggtgatcggcaattttggcctctcttggattcagcaggttacccaaatggctctgtgggcaattatggccggtcctcttttcatgagcaacgatctgcgcgcgatctcaccacaggcaaaggccctgctccaagacaaagatgtgatagccatcaatcaggacccgttgggaaagcagggctaccagctgagaaaaggcgacaactttgaggtctgggaaaggcctttgagtggagatgcgtgggctgtggccattattaatcggcaagagatcggaggtccacgctcctatacaattcctgtagcatctcttggcaagggcgttgcctgtaacccagcttgcttcatcactcagcttctgccggtgaagagaaaactgggtttctacgaagctaccagcaggctccgatcccacatcaaccctacaggaaccgtcctcttgcagctggagaatacgatgcagacttcactgaaggacctcctg

SEQ ID NO: 1196 - protein, 398 aa, Artificial Sequence
  variant of human alpha-galactosidase A
LDNGLARTPPMGWLHWERFMCNLDCQEEPDSCISEKLFEEMAERMVTEGWKDAGYEYLCIDDCWMAPQRDSEGRLQADPQRFPHGIRQLANHVHSKGLKLGIYADVGNKTCAGFPGSFGYYDIDAQTFADWGVDLLKFDGCYCDSLENLADGYKHMSLALNRTGRPIVYSCEWPLYMWPFQKPNYTEIRQYCNHWRNFADIDDSWASIKSILDWTSRNQERIVDVAGPGGWNDPDMLVIGNFGLSWIQQVTQMALWAIMAGPLFMSNDLRAISPQAKALLQDKDVIAINQDPLGKQGYQLRKGDNFEVWERPLSGDAWAVAIINRQEIGGPRSYTIPVASLGKGVACNPACFITQLLPVKRKLGFYEATSRLRSHINPTGTVLLQLENTMQTSLKDLL

SEQ ID NO: 1197 - DNA, 1194 bp, Artificial Sequence
  variant of human alpha-galactosidase A
ctggataatggattggctagaacacctcctatggggtggcttcactgggagaggttcatgtgcaacctggactgtcaggaagaaccagacagctgcatctccgagaagctctttgaggaaatggccgaacgaatggtgactgagggctggaaagatgcaggttacgagtatctgtgtattgacgattgctggatggccccacaacgggattctgagggaagacttcaggctgatccgcagcgcttccctcatggcataaggcagctggcaaaccacgtccacagtaaggggctcaaattgggaatctacgcggacgtgggcaataagacctgtgccggttttccgggatcattcgggtattatgacattgacgcccaaacgtttgctgattggggcgttgacctgctgaaattcgatggttgctactgtgacagcctcgaaaacctggcagacggctacaagcatatgtctctcgccctgaatagaaccggtcggccaatcgtatattcctgcgagtggcctctttacatgtggccatttcagaaaccgaactacacagaaattcgccagtattgcaatcattggaggaacttcgctgatatcgatgactcatgggcctccataaagagcatcttggactggaccagtcggaatcaggagcgaattgtggatgtcgcaggccctggaggatggaacgatccagacatgctggtgatcggcaattttggcctctcttggaagcagcaggttacccaaatggctctgtgggcaattatggccggtcctcttttcatgagcaacgatctgcgcgcgatctcaccacaggcaaaggccctgctccaagacaaagatgtgatagccatcaatcaggacccgttgggaaagcagggctaccagctgagaaaaggcgacaactttgaggtctgggaaaggcctttgagtggagatgcgtgggctgtggccattattaatcggcaagagatcggaggtccacgctcctatacaattcctgtagcatctcttggcaagggcgttgcctgtaacccagcttgcttcatcactcagcttctgccggtgaagagaaaactgggtttctacgaagctaccagcaggctccgatcccacatcaaccctacaggaaccgtcctcttgcagctggagaatacgatgcagacttcactgaaggacctcctg

SEQ ID NO: 1198 - protein, 398 aa, Artificial Sequence
  variant of human alpha-galactosidase A
LDNGLARTPPMGWLHWERFMCNLDCQEEPDSCISEKLFEEMAERMVTEGWKDAGYEYLCIDDCWMAPQRDSEGRLQADPQRFPHGIRQLANHVHSKGLKLGIYADVGNKTCAGFPGSFGYYDIDAQTFADWGVDLLKFDGCYCDSLENLADGYKHMSLALNRTGRPIVYSCEWPLYMWPFQKPNYTEIRQYCNHWRNFADIDDSWASIKSILDWTSRNQERIVDVAGPGGWNDPDMLVIGNFGLSWKQQVTQMALWAIMAGPLFMSNDLRAISPQAKALLQDKDVIAINQDPLGKQGYQLRKGDNFEVWERPLSGDAWAVAIINRQEIGGPRSYTIPVASLGKGVACNPACFITQLLPVKRKLGFYEATSRLRSHINPTGTVLLQLENTMQTSLKDLL

SEQ ID NO: 1199 - DNA, 1194 bp, Artificial Sequence
  variant of human alpha-galactosidase A
ctggataatggattggctagaacacctcctatggggtggcttcactgggagaggttcatgtgcaacctggactgtcaggaagaaccagacagctgcatctccgagaagctctttgaggaaatggccgaacgaatggtgactgagggctggaaagatgcaggttacgagtatctgtgtattgacgattgctggatggccccacaacgggattctgagggaagacttcaggctgatccgcagcgcttccctcatggcataaggcagctggcaaaccacgtccacagtaaggggctcaaattgggaatctacgcggacgtgggcaataagacctgtgccggttttccgggatcattcgggtattatgacattgacgcccaaacgtttgctgattggggcgttgacctgctgaaattcgatggttgctactgtgacagcctcgaaaacctggcagacggctacaagcatatgtctctcgccctgaatagaaccggtcggccaatcgtatattcctgcgagtggcctctttacatgtggccatttcagaaaccgaactacacagaaattcgccagtattgcaatcattggaggaacttcgctgatatcgatgactcatgggcctccataaagagcatcttggactggaccagtcggaatcaggagcgaattgtggatgtcgcaggccctggaggatggaacgatccagacatgctggtgatcggcaattttggcctctcttggttgcagcaggttacccaaatggctctgtgggcaattatggccggtcctcttttcatgagcaacgatctgcgcgcgatctcaccacaggcaaaggccctgctccaagacaaagatgtgatagccatcaatcaggacccgttgggaaagcagggctaccagctgagaaaaggcgacaactttgaggtctgggaaaggcctttgagtggagatgcgtgggctgtggccattattaatcggcaagagatcggaggtccacgctcctatacaattcctgtagcatctcttggcaagggcgttgcctgtaacccagcttgcttcatcactcagcttctgccggtgaagagaaaactgggtttctacgaagctaccagcaggctccgatcccacatcaaccctacaggaaccgtcctcttgcagctggagaatacgatgcagacttcactgaaggacctcctg

SEQ ID NO: 1200 - protein, 398 aa, Artificial Sequence
  variant of human alpha-galactosidase A
LDNGLARTPPMGWLHWERFMCNLDCQEEPDSCISEKLFEEMAERMVTEGWKDAGYEYLCIDDCWMAPQRDSEGRLQADPQRFPHGIRQLANHVHSKGLKLGIYADVGNKTCAGFPGSFGYYDIDAQTFADWGVDLLKFDGCYCDSLENLADGYKHMSLALNRTGRPIVYSCEWPLYMWPFQKPNYTEIRQYCNHWRNFADIDDSWASIKSILDWTSRNQERIVDVAGPGGWNDPDMLVIGNFGLSWLQQVTQMALWAIMAGPLFMSNDLRAISPQAKALLQDKDVIAINQDPLGKQGYQLRKGDNFEVWERPLSGDAWAVAIINRQEIGGPRSYTIPVASLGKGVACNPACFITQLLPVKRKLGFYEATSRLRSHINPTGTVLLQLENTMQTSLKDLL

SEQ ID NO: 1201 - DNA, 1194 bp, Artificial Sequence
  variant of human alpha-galactosidase A
ctggataatggattggctagaacacctcctatggggtggcttcactgggagaggttcatgtgcaacctggactgtcaggaagaaccagacagctgcatctccgagaagctctttgaggaaatggccgaacgaatggtgactgagggctggaaagatgcaggttacgagtatctgtgtattgacgattgctggatggccccacaacgggattctgagggaagacttcaggctgatccgcagcgcttccctcatggcataaggcagctggcaaaccacgtccacagtaaggggctcaaattgggaatctacgcggacgtgggcaataagacctgtgccggttttccgggatcattcgggtattatgacattgacgcccaaacgtttgctgattggggcgttgacctgctgaaattcgatggttgctactgtgacagcctcgaaaacctggcagacggctacaagcatatgtctctcgccctgaatagaaccggtcggccaatcgtatattcctgcgagtggcctctttacatgtggccatttcagaaaccgaactacacagaaattcgccagtattgcaatcattggaggaacttcgctgatatcgatgactcatgggcctccataaagagcatcttggactggaccagtcggaatcaggagcgaattgtggatgtcgcaggccctggaggatggaacgatccagacatgctggtgatcggcaattttggcctctcttggatgcagcaggttacccaaatggctctgtgggcaattatggccggtcctcttttcatgagcaacgatctgcgcgcgatctcaccacaggcaaaggccctgctccaagacaaagatgtgatagccatcaatcaggacccgttgggaaagcagggctaccagctgagaaaaggcgacaactttgaggtctgggaaaggcctttgagtggagatgcgtgggctgtggccattattaatcggcaagagatcggaggtccacgctcctatacaattcctgtagcatctcttggcaagggcgttgcctgtaacccagcttgcttcatcactcagcttctgccggtgaagagaaaactgggtttctacgaagctaccagcaggctccgatcccacatcaaccctacaggaaccgtcctcttgcagctggagaatacgatgcagacttcactgaaggacctcctg

SEQ ID NO: 1202 - protein, 398 aa, Artificial Sequence
  variant of human alpha-galactosidase A
LDNGLARTPPMGWLHWERFMCNLDCQEEPDSCISEKLFEEMAERMVTEGWKDAGYEYLCIDDCWMAPQRDSEGRLQADPQRFPHGIRQLANHVHSKGLKLGIYADVGNKTCAGFPGSFGYYDIDAQTFADWGVDLLKFDGCYCDSLENLADGYKHMSLALNRTGRPIVYSCEWPLYMWPFQKPNYTEIRQYCNHWRNFADIDDSWASIKSILDWTSRNQERIVDVAGPGGWNDPDMLVIGNFGLSWMQQVTQMALWAIMAGPLFMSNDLRAISPQAKALLQDKDVIAINQDPLGKQGYQLRKGDNFEVWERPLSGDAWAVAIINRQEIGGPRSYTIPVASLGKGVACNPACFITQLLPVKRKLGFYEATSRLRSHINPTGTVLLQLENTMQTSLKDLL

SEQ ID NO: 1203 - DNA, 1194 bp, Artificial Sequence
  variant of human alpha-galactosidase A
ctggataatggattggctagaacacctcctatggggtggcttcactgggagaggttcatgtgcaacctggactgtcaggaagaaccagacagctgcatctccgagaagctctttgaggaaatggccgaacgaatggtgactgagggctggaaagatgcaggttacgagtatctgtgtattgacgattgctggatggccccacaacgggattctgagggaagacttcaggctgatccgcagcgcttccctcatggcataaggcagctggcaaaccacgtccacagtaaggggctcaaattgggaatctacgcggacgtgggcaataagacctgtgccggttttccgggatcattcgggtattatgacattgacgcccaaacgtttgctgattggggcgttgacctgctgaaattcgatggttgctactgtgacagcctcgaaaacctggcagacggctacaagcatatgtctctcgccctgaatagaaccggtcggccaatcgtatattcctgcgagtggcctctttacatgtggccatttcagaaaccgaactacacagaaattcgccagtattgcaatcattggaggaacttcgctgatatcgatgactcatgggcctccataaagagcatcttggactggaccagtcggaatcaggagcgaattgtggatgtcgcaggccctggaggatggaacgatccagacatgctggtgatcggcaattttggcctctcttggaatcagcaggttacccaaatggctctgtgggcaattatggccggtcctcttttcatgagcaacgatctgcgcgcgatctcaccacaggcaaaggccctgctccaagacaaagatgtgatagccatcaatcaggacccgttgggaaagcagggctaccagctgagaaaaggcgacaactttgaggtctgggaaaggcctttgagtggagatgcgtgggctgtggccattattaatcggcaagagatcggaggtccacgctcctatacaattcctgtagcatctcttggcaagggcgttgcctgtaacccagcttgcttcatcactcagcttctgccggtgaagagaaaactgggtttctacgaagctaccagcaggctccgatcccacatcaaccctacaggaaccgtcctcttgcagctggagaatacgatgcagacttcactgaaggacctcctg

SEQ ID NO: 1204 - protein, 398 aa, Artificial Sequence
  variant of human alpha-galactosidase A
LDNGLARTPPMGWLHWERFMCNLDCQEEPDSCISEKLFEEMAERMVTEGWKDAGYEYLCIDDCWMAPQRDSEGRLQADPQRFPHGIRQLANHVHSKGLKLGIYADVGNKTCAGFPGSFGYYDIDAQTFADWGVDLLKFDGCYCDSLENLADGYKHMSLALNRTGRPIVYSCEWPLYMWPFQKPNYTEIRQYCNHWRNFADIDDSWASIKSILDWTSRNQERIVDVAGPGGWNDPDMLVIGNFGLSWNQQVTQMALWAIMAGPLFMSNDLRAISPQAKALLQDKDVIAINQDPLGKQGYQLRKGDNFEVWERPLSGDAWAVAIINRQEIGGPRSYTIPVASLGKGVACNPACFITQLLPVKRKLGFYEATSRLRSHINPTGTVLLQLENTMQTSLKDLL

SEQ ID NO: 1205 - DNA, 1194 bp, Artificial Sequence
  variant of human alpha-galactosidase A
ctggataatggattggctagaacacctcctatggggtggcttcactgggagaggttcatgtgcaacctggactgtcaggaagaaccagacagctgcatctccgagaagctctttgaggaaatggccgaacgaatggtgactgagggctggaaagatgcaggttacgagtatctgtgtattgacgattgctggatggccccacaacgggattctgagggaagacttcaggctgatccgcagcgcttccctcatggcataaggcagctggcaaaccacgtccacagtaaggggctcaaattgggaatctacgcggacgtgggcaataagacctgtgccggttttccgggatcattcgggtattatgacattgacgcccaaacgtttgctgattggggcgttgacctgctgaaattcgatggttgctactgtgacagcctcgaaaacctggcagacggctacaagcatatgtctctcgccctgaatagaaccggtcggccaatcgtatattcctgcgagtggcctctttacatgtggccatttcagaaaccgaactacacagaaattcgccagtattgcaatcattggaggaacttcgctgatatcgatgactcatgggcctccataaagagcatcttggactggaccagtcggaatcaggagcgaattgtggatgtcgcaggccctggaggatggaacgatccagacatgctggtgatcggcaattttggcctctcttggccgcagcaggttacccaaatggctctgtgggcaattatggccggtcctcttttcatgagcaacgatctgcgcgcgatctcaccacaggcaaaggccctgctccaagacaaagatgtgatagccatcaatcaggacccgttgggaaagcagggctaccagctgagaaaaggcgacaactttgaggtctgggaaaggcctttgagtggagatgcgtgggctgtggccattattaatcggcaagagatcggaggtccacgctcctatacaattcctgtagcatctcttggcaagggcgttgcctgtaacccagcttgcttcatcactcagcttctgccggtgaagagaaaactgggtttctacgaagctaccagcaggctccgatcccacatcaaccctacaggaaccgtcctcttgcagctggagaatacgatgcagacttcactgaaggacctcctg

SEQ ID NO: 1206 - protein, 398 aa, Artificial Sequence
  variant of human alpha-galactosidase A
LDNGLARTPPMGWLHWERFMCNLDCQEEPDSCISEKLFEEMAERMVTEGWKDAGYEYLCIDDCWMAPQRDSEGRLQADPQRFPHGIRQLANHVHSKGLKLGIYADVGNKTCAGFPGSFGYYDIDAQTFADWGVDLLKFDGCYCDSLENLADGYKHMSLALNRTGRPIVYSCEWPLYMWPFQKPNYTEIRQYCNHWRNFADIDDSWASIKSILDWTSRNQERIVDVAGPGGWNDPDMLVIGNFGLSWPQQVTQMALWAIMAGPLFMSNDLRAISPQAKALLQDKDVIAINQDPLGKQGYQLRKGDNFEVWERPLSGDAWAVAIINRQEIGGPRSYTIPVASLGKGVACNPACFITQLLPVKRKLGFYEATSRLRSHINPTGTVLLQLENTMQTSLKDLL

SEQ ID NO: 1207 - DNA, 1194 bp, Artificial Sequence
  variant of human alpha-galactosidase A
ctggataatggattggctagaacacctcctatggggtggcttcactgggagaggttcatgtgcaacctggactgtcaggaagaaccagacagctgcatctccgagaagctctttgaggaaatggccgaacgaatggtgactgagggctggaaagatgcaggttacgagtatctgtgtattgacgattgctggatggccccacaacgggattctgagggaagacttcaggctgatccgcagcgcttccctcatggcataaggcagctggcaaaccacgtccacagtaaggggctcaaattgggaatctacgcggacgtgggcaataagacctgtgccggttttccgggatcattcgggtattatgacattgacgcccaaacgtttgctgattggggcgttgacctgctgaaattcgatggttgctactgtgacagcctcgaaaacctggcagacggctacaagcatatgtctctcgccctgaatagaaccggtcggccaatcgtatattcctgcgagtggcctctttacatgtggccatttcagaaaccgaactacacagaaattcgccagtattgcaatcattggaggaacttcgctgatatcgatgactcatgggcctccataaagagcatcttggactggaccagtcggaatcaggagcgaattgtggatgtcgcaggccctggaggatggaacgatccagacatgctggtgatcggcaattttggcctctcttggcagcagcaggttacccaaatggctctgtgggcaattatggccggtcctcttttcatgagcaacgatctgcgcgcgatctcaccacaggcaaaggccctgctccaagacaaagatgtgatagccatcaatcaggacccgttgggaaagcagggctaccagctgagaaaaggcgacaactttgaggtctgggaaaggcctttgagtggagatgcgtgggctgtggccattattaatcggcaagagatcggaggtccacgctcctatacaattcctgtagcatctcttggcaagggcgttgcctgtaacccagcttgcttcatcactcagcttctgccggtgaagagaaaactgggtttctacgaagctaccagcaggctccgatcccacatcaaccctacaggaaccgtcctcttgcagctggagaatacgatgcagacttcactgaaggacctcctg

SEQ ID NO: 1208 - protein, 398 aa, Artificial Sequence
  variant of human alpha-galactosidase A
LDNGLARTPPMGWLHWERFMCNLDCQEEPDSCISEKLFEEMAERMVTEGWKDAGYEYLCIDDCWMAPQRDSEGRLQADPQRFPHGIRQLANHVHSKGLKLGIYADVGNKTCAGFPGSFGYYDIDAQTFADWGVDLLKFDGCYCDSLENLADGYKHMSLALNRTGRPIVYSCEWPLYMWPFQKPNYTEIRQYCNHWRNFADIDDSWASIKSILDWTSRNQERIVDVAGPGGWNDPDMLVIGNFGLSWQQQVTQMALWAIMAGPLFMSNDLRAISPQAKALLQDKDVIAINQDPLGKQGYQLRKGDNFEVWERPLSGDAWAVAIINRQEIGGPRSYTIPVASLGKGVACNPACFITQLLPVKRKLGFYEATSRLRSHINPTGTVLLQLENTMQTSLKDLL

SEQ ID NO: 1209 - DNA, 1194 bp, Artificial Sequence
  variant of human alpha-galactosidase A
ctggataatggattggctagaacacctcctatggggtggcttcactgggagaggttcatgtgcaacctggactgtcaggaagaaccagacagctgcatctccgagaagctctttgaggaaatggccgaacgaatggtgactgagggctggaaagatgcaggttacgagtatctgtgtattgacgattgctggatggccccacaacgggattctgagggaagacttcaggctgatccgcagcgcttccctcatggcataaggcagctggcaaaccacgtccacagtaaggggctcaaattgggaatctacgcggacgtgggcaataagacctgtgccggttttccgggatcattcgggtattatgacattgacgcccaaacgtttgctgattggggcgttgacctgctgaaattcgatggttgctactgtgacagcctcgaaaacctggcagacggctacaagcatatgtctctcgccctgaatagaaccggtcggccaatcgtatattcctgcgagtggcctctttacatgtggccatttcagaaaccgaactacacagaaattcgccagtattgcaatcattggaggaacttcgctgatatcgatgactcatgggcctccataaagagcatcttggactggaccagtcggaatcaggagcgaattgtggatgtcgcaggccctggaggatggaacgatccagacatgctggtgatcggcaattttggcctctcttggcggcagcaggttacccaaatggctctgtgggcaattatggccggtcctcttttcatgagcaacgatctgcgcgcgatctcaccacaggcaaaggccctgctccaagacaaagatgtgatagccatcaatcaggacccgttgggaaagcagggctaccagctgagaaaaggcgacaactttgaggtctgggaaaggcctttgagtggagatgcgtgggctgtggccattattaatcggcaagagatcggaggtccacgctcctatacaattcctgtagcatctcttggcaagggcgttgcctgtaacccagcttgcttcatcactcagcttctgccggtgaagagaaaactgggtttctacgaagctaccagcaggctccgatcccacatcaaccctacaggaaccgtcctcttgcagctggagaatacgatgcagacttcactgaaggacctcctg

SEQ ID NO: 1210 - protein, 398 aa, Artificial Sequence
  variant of human alpha-galactosidase A
LDNGLARTPPMGWLHWERFMCNLDCQEEPDSCISEKLFEEMAERMVTEGWKDAGYEYLCIDDCWMAPQRDSEGRLQADPQRFPHGIRQLANHVHSKGLKLGIYADVGNKTCAGFPGSFGYYDIDAQTFADWGVDLLKFDGCYCDSLENLADGYKHMSLALNRTGRPIVYSCEWPLYMWPFQKPNYTEIRQYCNHWRNFADIDDSWASIKSILDWTSRNQERIVDVAGPGGWNDPDMLVIGNFGLSWRQQVTQMALWAIMAGPLFMSNDLRAISPQAKALLQDKDVIAINQDPLGKQGYQLRKGDNFEVWERPLSGDAWAVAIINRQEIGGPRSYTIPVASLGKGVACNPACFITQLLPVKRKLGFYEATSRLRSHINPTGTVLLQLENTMQTSLKDLL

SEQ ID NO: 1211 - DNA, 1194 bp, Artificial Sequence
  variant of human alpha-galactosidase A
ctggataatggattggctagaacacctcctatggggtggcttcactgggagaggttcatgtgcaacctggactgtcaggaagaaccagacagctgcatctccgagaagctctttgaggaaatggccgaacgaatggtgactgagggctggaaagatgcaggttacgagtatctgtgtattgacgattgctggatggccccacaacgggattctgagggaagacttcaggctgatccgcagcgcttccctcatggcataaggcagctggcaaaccacgtccacagtaaggggctcaaattgggaatctacgcggacgtgggcaataagacctgtgccggttttccgggatcattcgggtattatgacattgacgcccaaacgtttgctgattggggcgttgacctgctgaaattcgatggttgctactgtgacagcctcgaaaacctggcagacggctacaagcatatgtctctcgccctgaatagaaccggtcggccaatcgtatattcctgcgagtggcctctttacatgtggccatttcagaaaccgaactacacagaaattcgccagtattgcaatcattggaggaacttcgctgatatcgatgactcatgggcctccataaagagcatcttggactggaccagtcggaatcaggagcgaattgtggatgtcgcaggccctggaggatggaacgatccagacatgctggtgatcggcaattttggcctctcttggtctcagcaggttacccaaatggctctgtgggcaattatggccggtcctcttttcatgagcaacgatctgcgcgcgatctcaccacaggcaaaggccctgctccaagacaaagatgtgatagccatcaatcaggacccgttgggaaagcagggctaccagctgagaaaaggcgacaactttgaggtctgggaaaggcctttgagtggagatgcgtgggctgtggccattattaatcggcaagagatcggaggtccacgctcctatacaattcctgtagcatctcttggcaagggcgttgcctgtaacccagcttgcttcatcactcagcttctgccggtgaagagaaaactgggtttctacgaagctaccagcaggctccgatcccacatcaaccctacaggaaccgtcctcttgcagctggagaatacgatgcagacttcactgaaggacctcctg

SEQ ID NO: 1212 - protein, 398 aa, Artificial Sequence
  variant of human alpha-galactosidase A
LDNGLARTPPMGWLHWERFMCNLDCQEEPDSCISEKLFEEMAERMVTEGWKDAGYEYLCIDDCWMAPQRDSEGRLQADPQRFPHGIRQLANHVHSKGLKLGIYADVGNKTCAGFPGSFGYYDIDAQTFADWGVDLLKFDGCYCDSLENLADGYKHMSLALNRTGRPIVYSCEWPLYMWPFQKPNYTEIRQYCNHWRNFADIDDSWASIKSILDWTSRNQERIVDVAGPGGWNDPDMLVIGNFGLSWSQQVTQMALWAIMAGPLFMSNDLRAISPQAKALLQDKDVIAINQDPLGKQGYQLRKGDNFEVWERPLSGDAWAVAIINRQEIGGPRSYTIPVASLGKGVACNPACFITQLLPVKRKLGFYEATSRLRSHINPTGTVLLQLENTMQTSLKDLL

SEQ ID NO: 1213 - DNA, 1194 bp, Artificial Sequence
  variant of human alpha-galactosidase A
ctggataatggattggctagaacacctcctatggggtggcttcactgggagaggttcatgtgcaacctggactgtcaggaagaaccagacagctgcatctccgagaagctctttgaggaaatggccgaacgaatggtgactgagggctggaaagatgcaggttacgagtatctgtgtattgacgattgctggatggccccacaacgggattctgagggaagacttcaggctgatccgcagcgcttccctcatggcataaggcagctggcaaaccacgtccacagtaaggggctcaaattgggaatctacgcggacgtgggcaataagacctgtgccggttttccgggatcattcgggtattatgacattgacgcccaaacgtttgctgattggggcgttgacctgctgaaattcgatggttgctactgtgacagcctcgaaaacctggcagacggctacaagcatatgtctctcgccctgaatagaaccggtcggccaatcgtatattcctgcgagtggcctctttacatgtggccatttcagaaaccgaactacacagaaattcgccagtattgcaatcattggaggaacttcgctgatatcgatgactcatgggcctccataaagagcatcttggactggaccagtcggaatcaggagcgaattgtggatgtcgcaggccctggaggatggaacgatccagacatgctggtgatcggcaattttggcctctcttggacgcagcaggttacccaaatggctctgtgggcaattatggccggtcctcttttcatgagcaacgatctgcgcgcgatctcaccacaggcaaaggccctgctccaagacaaagatgtgatagccatcaatcaggacccgttgggaaagcagggctaccagctgagaaaaggcgacaactttgaggtctgggaaaggcctttgagtggagatgcgtgggctgtggccattattaatcggcaagagatcggaggtccacgctcctatacaattcctgtagcatctcttggcaagggcgttgcctgtaacccagcttgcttcatcactcagcttctgccggtgaagagaaaactgggtttctacgaagctaccagcaggctccgatcccacatcaaccctacaggaaccgtcctcttgcagctggagaatacgatgcagacttcactgaaggacctcctg

SEQ ID NO: 1214 - protein, 398 aa, Artificial Sequence
  variant of human alpha-galactosidase A
LDNGLARTPPMGWLHWERFMCNLDCQEEPDSCISEKLFEEMAERMVTEGWKDAGYEYLCIDDCWMAPQRDSEGRLQADPQRFPHGIRQLANHVHSKGLKLGIYADVGNKTCAGFPGSFGYYDIDAQTFADWGVDLLKFDGCYCDSLENLADGYKHMSLALNRTGRPIVYSCEWPLYMWPFQKPNYTEIRQYCNHWRNFADIDDSWASIKSILDWTSRNQERIVDVAGPGGWNDPDMLVIGNFGLSWTQQVTQMALWAIMAGPLFMSNDLRAISPQAKALLQDKDVIAINQDPLGKQGYQLRKGDNFEVWERPLSGDAWAVAIINRQEIGGPRSYTIPVASLGKGVACNPACFITQLLPVKRKLGFYEATSRLRSHINPTGTVLLQLENTMQTSLKDLL

SEQ ID NO: 1215 - DNA, 1194 bp, Artificial Sequence
  variant of human alpha-galactosidase A
ctggataatggattggctagaacacctcctatggggtggcttcactgggagaggttcatgtgcaacctggactgtcaggaagaaccagacagctgcatctccgagaagctctttgaggaaatggccgaacgaatggtgactgagggctggaaagatgcaggttacgagtatctgtgtattgacgattgctggatggccccacaacgggattctgagggaagacttcaggctgatccgcagcgcttccctcatggcataaggcagctggcaaaccacgtccacagtaaggggctcaaattgggaatctacgcggacgtgggcaataagacctgtgccggttttccgggatcattcgggtattatgacattgacgcccaaacgtttgctgattggggcgttgacctgctgaaattcgatggttgctactgtgacagcctcgaaaacctggcagacggctacaagcatatgtctctcgccctgaatagaaccggtcggccaatcgtatattcctgcgagtggcctctttacatgtggccatttcagaaaccgaactacacagaaattcgccagtattgcaatcattggaggaacttcgctgatatcgatgactcatgggcctccataaagagcatcttggactggaccagtcggaatcaggagcgaattgtggatgtcgcaggccctggaggatggaacgatccagacatgctggtgatcggcaattttggcctctcttgggtgcagcaggttacccaaatggctctgtgggcaattatggccggtcctcttttcatgagcaacgatctgcgcgcgatctcaccacaggcaaaggccctgctccaagacaaagatgtgatagccatcaatcaggacccgttgggaaagcagggctaccagctgagaaaaggcgacaactttgaggtctgggaaaggcctttgagtggagatgcgtgggctgtggccattattaatcggcaagagatcggaggtccacgctcctatacaattcctgtagcatctcttggcaagggcgttgcctgtaacccagcttgcttcatcactcagcttctgccggtgaagagaaaactgggtttctacgaagctaccagcaggctccgatcccacatcaaccctacaggaaccgtcctcttgcagctggagaatacgatgcagacttcactgaaggacctcctg

SEQ ID NO: 1216 - protein, 398 aa, Artificial Sequence
  variant of human alpha-galactosidase A
LDNGLARTPPMGWLHWERFMCNLDCQEEPDSCISEKLFEEMAERMVTEGWKDAGYEYLCIDDCWMAPQRDSEGRLQADPQRFPHGIRQLANHVHSKGLKLGIYADVGNKTCAGFPGSFGYYDIDAQTFADWGVDLLKFDGCYCDSLENLADGYKHMSLALNRTGRPIVYSCEWPLYMWPFQKPNYTEIRQYCNHWRNFADIDDSWASIKSILDWTSRNQERIVDVAGPGGWNDPDMLVIGNFGLSWVQQVTQMALWAIMAGPLFMSNDLRAISPQAKALLQDKDVIAINQDPLGKQGYQLRKGDNFEVWERPLSGDAWAVAIINRQEIGGPRSYTIPVASLGKGVACNPACFITQLLPVKRKLGFYEATSRLRSHINPTGTVLLQLENTMQTSLKDLL

SEQ ID NO: 1217 - DNA, 1194 bp, Artificial Sequence
  variant of human alpha-galactosidase A
ctggataatggattggctagaacacctcctatggggtggcttcactgggagaggttcatgtgcaacctggactgtcaggaagaaccagacagctgcatctccgagaagctctttgaggaaatggccgaacgaatggtgactgagggctggaaagatgcaggttacgagtatctgtgtattgacgattgctggatggccccacaacgggattctgagggaagacttcaggctgatccgcagcgcttccctcatggcataaggcagctggcaaaccacgtccacagtaaggggctcaaattgggaatctacgcggacgtgggcaataagacctgtgccggttttccgggatcattcgggtattatgacattgacgcccaaacgtttgctgattggggcgttgacctgctgaaattcgatggttgctactgtgacagcctcgaaaacctggcagacggctacaagcatatgtctctcgccctgaatagaaccggtcggccaatcgtatattcctgcgagtggcctctttacatgtggccatttcagaaaccgaactacacagaaattcgccagtattgcaatcattggaggaacttcgctgatatcgatgactcatgggcctccataaagagcatcttggactggaccagtcggaatcaggagcgaattgtggatgtcgcaggccctggaggatggaacgatccagacatgctggtgatcggcaattttggcctctcttggtggcagcaggttacccaaatggctctgtgggcaattatggccggtcctcttttcatgagcaacgatctgcgcgcgatctcaccacaggcaaaggccctgctccaagacaaagatgtgatagccatcaatcaggacccgttgggaaagcagggctaccagctgagaaaaggcgacaactttgaggtctgggaaaggcctttgagtggagatgcgtgggctgtggccattattaatcggcaagagatcggaggtccacgctcctatacaattcctgtagcatctcttggcaagggcgttgcctgtaacccagcttgcttcatcactcagcttctgccggtgaagagaaaactgggtttctacgaagctaccagcaggctccgatcccacatcaaccctacaggaaccgtcctcttgcagctggagaatacgatgcagacttcactgaaggacctcctg

SEQ ID NO: 1218 - protein, 398 aa, Artificial Sequence
  variant of human alpha-galactosidase A
LDNGLARTPPMGWLHWERFMCNLDCQEEPDSCISEKLFEEMAERMVTEGWKDAGYEYLCIDDCWMAPQRDSEGRLQADPQRFPHGIRQLANHVHSKGLKLGIYADVGNKTCAGFPGSFGYYDIDAQTFADWGVDLLKFDGCYCDSLENLADGYKHMSLALNRTGRPIVYSCEWPLYMWPFQKPNYTEIRQYCNHWRNFADIDDSWASIKSILDWTSRNQERIVDVAGPGGWNDPDMLVIGNFGLSWWQQVTQMALWAIMAGPLFMSNDLRAISPQAKALLQDKDVIAINQDPLGKQGYQLRKGDNFEVWERPLSGDAWAVAIINRQEIGGPRSYTIPVASLGKGVACNPACFITQLLPVKRKLGFYEATSRLRSHINPTGTVLLQLENTMQTSLKDLL

SEQ ID NO: 1219 - DNA, 1194 bp, Artificial Sequence
  variant of human alpha-galactosidase A
ctggataatggattggctagaacacctcctatggggtggcttcactgggagaggttcatgtgcaacctggactgtcaggaagaaccagacagctgcatctccgagaagctctttgaggaaatggccgaacgaatggtgactgagggctggaaagatgcaggttacgagtatctgtgtattgacgattgctggatggccccacaacgggattctgagggaagacttcaggctgatccgcagcgcttccctcatggcataaggcagctggcaaaccacgtccacagtaaggggctcaaattgggaatctacgcggacgtgggcaataagacctgtgccggttttccgggatcattcgggtattatgacattgacgcccaaacgtttgctgattggggcgttgacctgctgaaattcgatggttgctactgtgacagcctcgaaaacctggcagacggctacaagcatatgtctctcgccctgaatagaaccggtcggccaatcgtatattcctgcgagtggcctctttacatgtggccatttcagaaaccgaactacacagaaattcgccagtattgcaatcattggaggaacttcgctgatatcgatgactcatgggcctccataaagagcatcttggactggaccagtcggaatcaggagcgaattgtggatgtcgcaggccctggaggatggaacgatccagacatgctggtgatcggcaattttggcctctcttggtatcagcaggttacccaaatggctctgtgggcaattatggccggtcctcttttcatgagcaacgatctgcgcgcgatctcaccacaggcaaaggccctgctccaagacaaagatgtgatagccatcaatcaggacccgttgggaaagcagggctaccagctgagaaaaggcgacaactttgaggtctgggaaaggcctttgagtggagatgcgtgggctgtggccattattaatcggcaagagatcggaggtccacgctcctatacaattcctgtagcatctcttggcaagggcgttgcctgtaacccagcttgcttcatcactcagcttctgccggtgaagagaaaactgggtttctacgaagctaccagcaggctccgatcccacatcaaccctacaggaaccgtcctcttgcagctggagaatacgatgcagacttcactgaaggacctcctg

SEQ ID NO: 1220 - protein, 398 aa, Artificial Sequence
  variant of human alpha-galactosidase A
LDNGLARTPPMGWLHWERFMCNLDCQEEPDSCISEKLFEEMAERMVTEGWKDAGYEYLCIDDCWMAPQRDSEGRLQADPQRFPHGIRQLANHVHSKGLKLGIYADVGNKTCAGFPGSFGYYDIDAQTFADWGVDLLKFDGCYCDSLENLADGYKHMSLALNRTGRPIVYSCEWPLYMWPFQKPNYTEIRQYCNHWRNFADIDDSWASIKSILDWTSRNQERIVDVAGPGGWNDPDMLVIGNFGLSWYQQVTQMALWAIMAGPLFMSNDLRAISPQAKALLQDKDVIAINQDPLGKQGYQLRKGDNFEVWERPLSGDAWAVAIINRQEIGGPRSYTIPVASLGKGVACNPACFITQLLPVKRKLGFYEATSRLRSHINPTGTVLLQLENTMQTSLKDLL

SEQ ID NO: 1221 - DNA, 1194 bp, Artificial Sequence
  variant of human alpha-galactosidase A
ctggataatggattggctagaacacctcctatggggtggcttcactgggagaggttcatgtgcaacctggactgtcaggaagaaccagacagctgcatctccgagaagctctttgaggaaatggccgaacgaatggtgactgagggctggaaagatgcaggttacgagtatctgtgtattgacgattgctggatggccccacaacgggattctgagggaagacttcaggctgatccgcagcgcttccctcatggcataaggcagctggcaaaccacgtccacagtaaggggctcaaattgggaatctacgcggacgtgggcaataagacctgtgccggttttccgggatcattcgggtattatgacattgacgcccaaacgtttgctgattggggcgttgacctgctgaaattcgatggttgctactgtgacagcctcgaaaacctggcagacggctacaagcatatgtctctcgccctgaatagaaccggtcggccaatcgtatattcctgcgagtggcctctttacatgtggccatttcagaaaccgaactacacagaaattcgccagtattgcaatcattggaggaacttcgctgatatcgatgactcatgggcctccataaagagcatcttggactggaccagtcggaatcaggagcgaattgtggatgtcgcaggccctggaggatggaacgatccagacatgctggtgatcggcaattttggcctctcttgggaccagcaggttacccaaatggctctgtgggcaattatggccggtcctcttttcatgagcaacgatctgcgcgcgatctcaccacaggcaaaggccctgctccaagacaaagatgtgatagccatcaatcaggacccgttgggaaagcagggctaccagctgagaaaaggcgacaactttgaggtctgggaaaggcctttgagtggagcggcgtgggctgtggccattattaatcggcaagagatcggaggtccacgctcctatacaattcctgtagcatctcttggcaagggcgttgcctgtaacccagcttgcttcatcactcagcttctgccggtgaagagaaaactgggtttctacgaagctaccagcaggctccgatcccacatcaaccctacaggaaccgtcctcttgcagctggagaatacgatgcagacttcactgaaggacctcctg

SEQ ID NO: 1222 - protein, 398 aa, Artificial Sequence
  variant of human alpha-galactosidase A
LDNGLARTPPMGWLHWERFMCNLDCQEEPDSCISEKLFEEMAERMVTEGWKDAGYEYLCIDDCWMAPQRDSEGRLQADPQRFPHGIRQLANHVHSKGLKLGIYADVGNKTCAGFPGSFGYYDIDAQTFADWGVDLLKFDGCYCDSLENLADGYKHMSLALNRTGRPIVYSCEWPLYMWPFQKPNYTEIRQYCNHWRNFADIDDSWASIKSILDWTSRNQERIVDVAGPGGWNDPDMLVIGNFGLSWDQQVTQMALWAIMAGPLFMSNDLRAISPQAKALLQDKDVIAINQDPLGKQGYQLRKGDNFEVWERPLSGAAWAVAIINRQEIGGPRSYTIPVASLGKGVACNPACFITQLLPVKRKLGFYEATSRLRSHINPTGTVLLQLENTMQTSLKDLL

SEQ ID NO: 1223 - DNA, 1194 bp, Artificial Sequence
  variant of human alpha-galactosidase A
ctggataatggattggctagaacacctcctatggggtggcttcactgggagaggttcatgtgcaacctggactgtcaggaagaaccagacagctgcatctccgagaagctctttgaggaaatggccgaacgaatggtgactgagggctggaaagatgcaggttacgagtatctgtgtattgacgattgctggatggccccacaacgggattctgagggaagacttcaggctgatccgcagcgcttccctcatggcataaggcagctggcaaaccacgtccacagtaaggggctcaaattgggaatctacgcggacgtgggcaataagacctgtgccggttttccgggatcattcgggtattatgacattgacgcccaaacgtttgctgattggggcgttgacctgctgaaattcgatggttgctactgtgacagcctcgaaaacctggcagacggctacaagcatatgtctctcgccctgaatagaaccggtcggccaatcgtatattcctgcgagtggcctctttacatgtggccatttcagaaaccgaactacacagaaattcgccagtattgcaatcattggaggaacttcgctgatatcgatgactcatgggcctccataaagagcatcttggactggaccagtcggaatcaggagcgaattgtggatgtcgcaggccctggaggatggaacgatccagacatgctggtgatcggcaattttggcctctcttgggaccagcaggttacccaaatggctctgtgggcaattatggccggtcctcttttcatgagcaacgatctgcgcgcgatctcaccacaggcaaaggccctgctccaagacaaagatgtgatagccatcaatcaggacccgttgggaaagcagggctaccagctgagaaaaggcgacaactttgaggtctgggaaaggcctttgagtggatgtgcgtgggctgtggccattattaatcggcaagagatcggaggtccacgctcctatacaattcctgtagcatctcttggcaagggcgttgcctgtaacccagcttgcttcatcactcagcttctgccggtgaagagaaaactgggtttctacgaagctaccagcaggctccgatcccacatcaaccctacaggaaccgtcctcttgcagctggagaatacgatgcagacttcactgaaggacctcctg

SEQ ID NO: 1224 - protein, 398 aa, Artificial Sequence
  variant of human alpha-galactosidase A
LDNGLARTPPMGWLHWERFMCNLDCQEEPDSCISEKLFEEMAERMVTEGWKDAGYEYLCIDDCWMAPQRDSEGRLQADPQRFPHGIRQLANHVHSKGLKLGIYADVGNKTCAGFPGSFGYYDIDAQTFADWGVDLLKFDGCYCDSLENLADGYKHMSLALNRTGRPIVYSCEWPLYMWPFQKPNYTEIRQYCNHWRNFADIDDSWASIKSILDWTSRNQERIVDVAGPGGWNDPDMLVIGNFGLSWDQQVTQMALWAIMAGPLFMSNDLRAISPQAKALLQDKDVIAINQDPLGKQGYQLRKGDNFEVWERPLSGCAWAVAIINRQEIGGPRSYTIPVASLGKGVACNPACFITQLLPVKRKLGFYEATSRLRSHINPTGTVLLQLENTMQTSLKDLL

SEQ ID NO: 1225 - DNA, 1194 bp, Artificial Sequence
  variant of human alpha-galactosidase A
ctggataatggattggctagaacacctcctatggggtggcttcactgggagaggttcatgtgcaacctggactgtcaggaagaaccagacagctgcatctccgagaagctctttgaggaaatggccgaacgaatggtgactgagggctggaaagatgcaggttacgagtatctgtgtattgacgattgctggatggccccacaacgggattctgagggaagacttcaggctgatccgcagcgcttccctcatggcataaggcagctggcaaaccacgtccacagtaaggggctcaaattgggaatctacgcggacgtgggcaataagacctgtgccggttttccgggatcattcgggtattatgacattgacgcccaaacgtttgctgattggggcgttgacctgctgaaattcgatggttgctactgtgacagcctcgaaaacctggcagacggctacaagcatatgtctctcgccctgaatagaaccggtcggccaatcgtatattcctgcgagtggcctctttacatgtggccatttcagaaaccgaactacacagaaattcgccagtattgcaatcattggaggaacttcgctgatatcgatgactcatgggcctccataaagagcatcttggactggaccagtcggaatcaggagcgaattgtggatgtcgcaggccctggaggatggaacgatccagacatgctggtgatcggcaattttggcctctcttgggaccagcaggttacccaaatggctctgtgggcaattatggccggtcctcttttcatgagcaacgatctgcgcgcgatctcaccacaggcaaaggccctgctccaagacaaagatgtgatagccatcaatcaggacccgttgggaaagcagggctaccagctgagaaaaggcgacaactttgaggtctgggaaaggcctttgagtggagaggcgtgggctgtggccattattaatcggcaagagatcggaggtccacgctcctatacaattcctgtagcatctcttggcaagggcgttgcctgtaacccagcttgcttcatcactcagcttctgccggtgaagagaaaactgggtttctacgaagctaccagcaggctccgatcccacatcaaccctacaggaaccgtcctcttgcagctggagaatacgatgcagacttcactgaaggacctcctg

SEQ ID NO: 1226 - protein, 398 aa, Artificial Sequence
  variant of human alpha-galactosidase A
LDNGLARTPPMGWLHWERFMCNLDCQEEPDSCISEKLFEEMAERMVTEGWKDAGYEYLCIDDCWMAPQRDSEGRLQADPQRFPHGIRQLANHVHSKGLKLGIYADVGNKTCAGFPGSFGYYDIDAQTFADWGVDLLKFDGCYCDSLENLADGYKHMSLALNRTGRPIVYSCEWPLYMWPFQKPNYTEIRQYCNHWRNFADIDDSWASIKSILDWTSRNQERIVDVAGPGGWNDPDMLVIGNFGLSWDQQVTQMALWAIMAGPLFMSNDLRAISPQAKALLQDKDVIAINQDPLGKQGYQLRKGDNFEVWERPLSGEAWAVAIINRQEIGGPRSYTIPVASLGKGVACNPACFITQLLPVKRKLGFYEATSRLRSHINPTGTVLLQLENTMQTSLKDLL

SEQ ID NO: 1227 - DNA, 1194 bp, Artificial Sequence
  variant of human alpha-galactosidase A
ctggataatggattggctagaacacctcctatggggtggcttcactgggagaggttcatgtgcaacctggactgtcaggaagaaccagacagctgcatctccgagaagctctttgaggaaatggccgaacgaatggtgactgagggctggaaagatgcaggttacgagtatctgtgtattgacgattgctggatggccccacaacgggattctgagggaagacttcaggctgatccgcagcgcttccctcatggcataaggcagctggcaaaccacgtccacagtaaggggctcaaattgggaatctacgcggacgtgggcaataagacctgtgccggttttccgggatcattcgggtattatgacattgacgcccaaacgtttgctgattggggcgttgacctgctgaaattcgatggttgctactgtgacagcctcgaaaacctggcagacggctacaagcatatgtctctcgccctgaatagaaccggtcggccaatcgtatattcctgcgagtggcctctttacatgtggccatttcagaaaccgaactacacagaaattcgccagtattgcaatcattggaggaacttcgctgatatcgatgactcatgggcctccataaagagcatcttggactggaccagtcggaatcaggagcgaattgtggatgtcgcaggccctggaggatggaacgatccagacatgctggtgatcggcaattttggcctctcttgggaccagcaggttacccaaatggctctgtgggcaattatggccggtcctcttttcatgagcaacgatctgcgcgcgatctcaccacaggcaaaggccctgctccaagacaaagatgtgatagccatcaatcaggacccgttgggaaagcagggctaccagctgagaaaaggcgacaactttgaggtctgggaaaggcctttgagtggatttgcgtgggctgtggccattattaatcggcaagagatcggaggtccacgctcctatacaattcctgtagcatctcttggcaagggcgttgcctgtaacccagcttgcttcatcactcagcttctgccggtgaagagaaaactgggtttctacgaagctaccagcaggctccgatcccacatcaaccctacaggaaccgtcctcttgcagctggagaatacgatgcagacttcactgaaggacctcctg

SEQ ID NO: 1228 - protein, 398 aa, Artificial Sequence
  variant of human alpha-galactosidase A
LDNGLARTPPMGWLHWERFMCNLDCQEEPDSCISEKLFEEMAERMVTEGWKDAGYEYLCIDDCWMAPQRDSEGRLQADPQRFPHGIRQLANHVHSKGLKLGIYADVGNKTCAGFPGSFGYYDIDAQTFADWGVDLLKFDGCYCDSLENLADGYKHMSLALNRTGRPIVYSCEWPLYMWPFQKPNYTEIRQYCNHWRNFADIDDSWASIKSILDWTSRNQERIVDVAGPGGWNDPDMLVIGNFGLSWDQQVTQMALWAIMAGPLFMSNDLRAISPQAKALLQDKDVIAINQDPLGKQGYQLRKGDNFEVWERPLSGFAWAVAIINRQEIGGPRSYTIPVASLGKGVACNPACFITQLLPVKRKLGFYEATSRLRSHINPTGTVLLQLENTMQTSLKDLL

SEQ ID NO: 1229 - DNA, 1194 bp, Artificial Sequence
  variant of human alpha-galactosidase A
ctggataatggattggctagaacacctcctatggggtggcttcactgggagaggttcatgtgcaacctggactgtcaggaagaaccagacagctgcatctccgagaagctctttgaggaaatggccgaacgaatggtgactgagggctggaaagatgcaggttacgagtatctgtgtattgacgattgctggatggccccacaacgggattctgagggaagacttcaggctgatccgcagcgcttccctcatggcataaggcagctggcaaaccacgtccacagtaaggggctcaaattgggaatctacgcggacgtgggcaataagacctgtgccggttttccgggatcattcgggtattatgacattgacgcccaaacgtttgctgattggggcgttgacctgctgaaattcgatggttgctactgtgacagcctcgaaaacctggcagacggctacaagcatatgtctctcgccctgaatagaaccggtcggccaatcgtatattcctgcgagtggcctctttacatgtggccatttcagaaaccgaactacacagaaattcgccagtattgcaatcattggaggaacttcgctgatatcgatgactcatgggcctccataaagagcatcttggactggaccagtcggaatcaggagcgaattgtggatgtcgcaggccctggaggatggaacgatccagacatgctggtgatcggcaattttggcctctcttgggaccagcaggttacccaaatggctctgtgggcaattatggccggtcctcttttcatgagcaacgatctgcgcgcgatctcaccacaggcaaaggccctgctccaagacaaagatgtgatagccatcaatcaggacccgttgggaaagcagggctaccagctgagaaaaggcgacaactttgaggtctgggaaaggcctttgagtggaggggcgtgggctgtggccattattaatcggcaagagatcggaggtccacgctcctatacaattcctgtagcatctcttggcaagggcgttgcctgtaacccagcttgcttcatcactcagcttctgccggtgaagagaaaactgggtttctacgaagctaccagcaggctccgatcccacatcaaccctacaggaaccgtcctcttgcagctggagaatacgatgcagacttcactgaaggacctcctg

SEQ ID NO: 1230 - protein, 398 aa, Artificial Sequence
  variant of human alpha-galactosidase A
LDNGLARTPPMGWLHWERFMCNLDCQEEPDSCISEKLFEEMAERMVTEGWKDAGYEYLCIDDCWMAPQRDSEGRLQADPQRFPHGIRQLANHVHSKGLKLGIYADVGNKTCAGFPGSFGYYDIDAQTFADWGVDLLKFDGCYCDSLENLADGYKHMSLALNRTGRPIVYSCEWPLYMWPFQKPNYTEIRQYCNHWRNFADIDDSWASIKSILDWTSRNQERIVDVAGPGGWNDPDMLVIGNFGLSWDQQVTQMALWAIMAGPLFMSNDLRAISPQAKALLQDKDVIAINQDPLGKQGYQLRKGDNFEVWERPLSGGAWAVAIINRQEIGGPRSYTIPVASLGKGVACNPACFITQLLPVKRKLGFYEATSRLRSHINPTGTVLLQLENTMQTSLKDLL

SEQ ID NO: 1231 - DNA, 1194 bp, Artificial Sequence
  variant of human alpha-galactosidase A
ctggataatggattggctagaacacctcctatggggtggcttcactgggagaggttcatgtgcaacctggactgtcaggaagaaccagacagctgcatctccgagaagctctttgaggaaatggccgaacgaatggtgactgagggctggaaagatgcaggttacgagtatctgtgtattgacgattgctggatggccccacaacgggattctgagggaagacttcaggctgatccgcagcgcttccctcatggcataaggcagctggcaaaccacgtccacagtaaggggctcaaattgggaatctacgcggacgtgggcaataagacctgtgccggttttccgggatcattcgggtattatgacattgacgcccaaacgtttgctgattggggcgttgacctgctgaaattcgatggttgctactgtgacagcctcgaaaacctggcagacggctacaagcatatgtctctcgccctgaatagaaccggtcggccaatcgtatattcctgcgagtggcctctttacatgtggccatttcagaaaccgaactacacagaaattcgccagtattgcaatcattggaggaacttcgctgatatcgatgactcatgggcctccataaagagcatcttggactggaccagtcggaatcaggagcgaattgtggatgtcgcaggccctggaggatggaacgatccagacatgctggtgatcggcaattttggcctctcttgggaccagcaggttacccaaatggctctgtgggcaattatggccggtcctcttttcatgagcaacgatctgcgcgcgatctcaccacaggcaaaggccctgctccaagacaaagatgtgatagccatcaatcaggacccgttgggaaagcagggctaccagctgagaaaaggcgacaactttgaggtctgggaaaggcctttgagtggacatgcgtgggctgtggccattattaatcggcaagagatcggaggtccacgctcctatacaattcctgtagcatctcttggcaagggcgttgcctgtaacccagcttgcttcatcactcagcttctgccggtgaagagaaaactgggtttctacgaagctaccagcaggctccgatcccacatcaaccctacaggaaccgtcctcttgcagctggagaatacgatgcagacttcactgaaggacctcctg

SEQ ID NO: 1232 - protein, 398 aa, Artificial Sequence
  variant of human alpha-galactosidase A
LDNGLARTPPMGWLHWERFMCNLDCQEEPDSCISEKLFEEMAERMVTEGWKDAGYEYLCIDDCWMAPQRDSEGRLQADPQRFPHGIRQLANHVHSKGLKLGIYADVGNKTCAGFPGSFGYYDIDAQTFADWGVDLLKFDGCYCDSLENLADGYKHMSLALNRTGRPIVYSCEWPLYMWPFQKPNYTEIRQYCNHWRNFADIDDSWASIKSILDWTSRNQERIVDVAGPGGWNDPDMLVIGNFGLSWDQQVTQMALWAIMAGPLFMSNDLRAISPQAKALLQDKDVIAINQDPLGKQGYQLRKGDNFEVWERPLSGHAWAVAIINRQEIGGPRSYTIPVASLGKGVACNPACFITQLLPVKRKLGFYEATSRLRSHINPTGTVLLQLENTMQTSLKDLL

SEQ ID NO: 1233 - DNA, 1194 bp, Artificial Sequence
  variant of human alpha-galactosidase A
ctggataatggattggctagaacacctcctatggggtggcttcactgggagaggttcatgtgcaacctggactgtcaggaagaaccagacagctgcatctccgagaagctctttgaggaaatggccgaacgaatggtgactgagggctggaaagatgcaggttacgagtatctgtgtattgacgattgctggatggccccacaacgggattctgagggaagacttcaggctgatccgcagcgcttccctcatggcataaggcagctggcaaaccacgtccacagtaaggggctcaaattgggaatctacgcggacgtgggcaataagacctgtgccggttttccgggatcattcgggtattatgacattgacgcccaaacgtttgctgattggggcgttgacctgctgaaattcgatggttgctactgtgacagcctcgaaaacctggcagacggctacaagcatatgtctctcgccctgaatagaaccggtcggccaatcgtatattcctgcgagtggcctctttacatgtggccatttcagaaaccgaactacacagaaattcgccagtattgcaatcattggaggaacttcgctgatatcgatgactcatgggcctccataaagagcatcttggactggaccagtcggaatcaggagcgaattgtggatgtcgcaggccctggaggatggaacgatccagacatgctggtgatcggcaattttggcctctcttgggaccagcaggttacccaaatggctctgtgggcaattatggccggtcctcttttcatgagcaacgatctgcgcgcgatctcaccacaggcaaaggccctgctccaagacaaagatgtgatagccatcaatcaggacccgttgggaaagcagggctaccagctgagaaaaggcgacaactttgaggtctgggaaaggcctttgagtggaattgcgtgggctgtggccattattaatcggcaagagatcggaggtccacgctcctatacaattcctgtagcatctcttggcaagggcgttgcctgtaacccagcttgcttcatcactcagcttctgccggtgaagagaaaactgggtttctacgaagctaccagcaggctccgatcccacatcaaccctacaggaaccgtcctcttgcagctggagaatacgatgcagacttcactgaaggacctcctg

SEQ ID NO: 1234 - protein, 398 aa, Artificial Sequence
  variant of human alpha-galactosidase A
LDNGLARTPPMGWLHWERFMCNLDCQEEPDSCISEKLFEEMAERMVTEGWKDAGYEYLCIDDCWMAPQRDSEGRLQADPQRFPHGIRQLANHVHSKGLKLGIYADVGNKTCAGFPGSFGYYDIDAQTFADWGVDLLKFDGCYCDSLENLADGYKHMSLALNRTGRPIVYSCEWPLYMWPFQKPNYTEIRQYCNHWRNFADIDDSWASIKSILDWTSRNQERIVDVAGPGGWNDPDMLVIGNFGLSWDQQVTQMALWAIMAGPLFMSNDLRAISPQAKALLQDKDVIAINQDPLGKQGYQLRKGDNFEVWERPLSGIAWAVAIINRQEIGGPRSYTIPVASLGKGVACNPACFITQLLPVKRKLGFYEATSRLRSHINPTGTVLLQLENTMQTSLKDLL

SEQ ID NO: 1235 - DNA, 1194 bp, Artificial Sequence
  variant of human alpha-galactosidase A
ctggataatggattggctagaacacctcctatggggtggcttcactgggagaggttcatgtgcaacctggactgtcaggaagaaccagacagctgcatctccgagaagctctttgaggaaatggccgaacgaatggtgactgagggctggaaagatgcaggttacgagtatctgtgtattgacgattgctggatggccccacaacgggattctgagggaagacttcaggctgatccgcagcgcttccctcatggcataaggcagctggcaaaccacgtccacagtaaggggctcaaattgggaatctacgcggacgtgggcaataagacctgtgccggttttccgggatcattcgggtattatgacattgacgcccaaacgtttgctgattggggcgttgacctgctgaaattcgatggttgctactgtgacagcctcgaaaacctggcagacggctacaagcatatgtctctcgccctgaatagaaccggtcggccaatcgtatattcctgcgagtggcctctttacatgtggccatttcagaaaccgaactacacagaaattcgccagtattgcaatcattggaggaacttcgctgatatcgatgactcatgggcctccataaagagcatcttggactggaccagtcggaatcaggagcgaattgtggatgtcgcaggccctggaggatggaacgatccagacatgctggtgatcggcaattttggcctctcttgggaccagcaggttacccaaatggctctgtgggcaattatggccggtcctcttttcatgagcaacgatctgcgcgcgatctcaccacaggcaaaggccctgctccaagacaaagatgtgatagccatcaatcaggacccgttgggaaagcagggctaccagctgagaaaaggcgacaactttgaggtctgggaaaggcctttgagtggaaaagcgtgggctgtggccattattaatcggcaagagatcggaggtccacgctcctatacaattcctgtagcatctcttggcaagggcgttgcctgtaacccagcttgcttcatcactcagcttctgccggtgaagagaaaactgggtttctacgaagctaccagcaggctccgatcccacatcaaccctacaggaaccgtcctcttgcagctggagaatacgatgcagacttcactgaaggacctcctg

SEQ ID NO: 1236 - protein, 398 aa, Artificial Sequence
  variant of human alpha-galactosidase A
LDNGLARTPPMGWLHWERFMCNLDCQEEPDSCISEKLFEEMAERMVTEGWKDAGYEYLCIDDCWMAPQRDSEGRLQADPQRFPHGIRQLANHVHSKGLKLGIYADVGNKTCAGFPGSFGYYDIDAQTFADWGVDLLKFDGCYCDSLENLADGYKHMSLALNRTGRPIVYSCEWPLYMWPFQKPNYTEIRQYCNHWRNFADIDDSWASIKSILDWTSRNQERIVDVAGPGGWNDPDMLVIGNFGLSWDQQVTQMALWAIMAGPLFMSNDLRAISPQAKALLQDKDVIAINQDPLGKQGYQLRKGDNFEVWERPLSGKAWAVAIINRQEIGGPRSYTIPVASLGKGVACNPACFITQLLPVKRKLGFYEATSRLRSHINPTGTVLLQLENTMQTSLKDLL

SEQ ID NO: 1237 - DNA, 1194 bp, Artificial Sequence
  variant of human alpha-galactosidase A
ctggataatggattggctagaacacctcctatggggtggcttcactgggagaggttcatgtgcaacctggactgtcaggaagaaccagacagctgcatctccgagaagctctttgaggaaatggccgaacgaatggtgactgagggctggaaagatgcaggttacgagtatctgtgtattgacgattgctggatggccccacaacgggattctgagggaagacttcaggctgatccgcagcgcttccctcatggcataaggcagctggcaaaccacgtccacagtaaggggctcaaattgggaatctacgcggacgtgggcaataagacctgtgccggttttccgggatcattcgggtattatgacattgacgcccaaacgtttgctgattggggcgttgacctgctgaaattcgatggttgctactgtgacagcctcgaaaacctggcagacggctacaagcatatgtctctcgccctgaatagaaccggtcggccaatcgtatattcctgcgagtggcctctttacatgtggccatttcagaaaccgaactacacagaaattcgccagtattgcaatcattggaggaacttcgctgatatcgatgactcatgggcctccataaagagcatcttggactggaccagtcggaatcaggagcgaattgtggatgtcgcaggccctggaggatggaacgatccagacatgctggtgatcggcaattttggcctctcttgggaccagcaggttacccaaatggctctgtgggcaattatggccggtcctcttttcatgagcaacgatctgcgcgcgatctcaccacaggcaaaggccctgctccaagacaaagatgtgatagccatcaatcaggacccgttgggaaagcagggctaccagctgagaaaaggcgacaactttgaggtctgggaaaggcctttgagtggacttgcgtgggctgtggccattattaatcggcaagagatcggaggtccacgctcctatacaattcctgtagcatctcttggcaagggcgttgcctgtaacccagcttgcttcatcactcagcttctgccggtgaagagaaaactgggtttctacgaagctaccagcaggctccgatcccacatcaaccctacaggaaccgtcctcttgcagctggagaatacgatgcagacttcactgaaggacctcctg

SEQ ID NO: 1238 - protein, 398 aa, Artificial Sequence
  variant of human alpha-galactosidase A
LDNGLARTPPMGWLHWERFMCNLDCQEEPDSCISEKLFEEMAERMVTEGWKDAGYEYLCIDDCWMAPQRDSEGRLQADPQRFPHGIRQLANHVHSKGLKLGIYADVGNKTCAGFPGSFGYYDIDAQTFADWGVDLLKFDGCYCDSLENLADGYKHMSLALNRTGRPIVYSCEWPLYMWPFQKPNYTEIRQYCNHWRNFADIDDSWASIKSILDWTSRNQERIVDVAGPGGWNDPDMLVIGNFGLSWDQQVTQMALWAIMAGPLFMSNDLRAISPQAKALLQDKDVIAINQDPLGKQGYQLRKGDNFEVWERPLSGLAWAVAIINRQEIGGPRSYTIPVASLGKGVACNPACFITQLLPVKRKLGFYEATSRLRSHINPTGTVLLQLENTMQTSLKDLL

SEQ ID NO: 1239 - DNA, 1194 bp, Artificial Sequence
  variant of human alpha-galactosidase A
ctggataatggattggctagaacacctcctatggggtggcttcactgggagaggttcatgtgcaacctggactgtcaggaagaaccagacagctgcatctccgagaagctctttgaggaaatggccgaacgaatggtgactgagggctggaaagatgcaggttacgagtatctgtgtattgacgattgctggatggccccacaacgggattctgagggaagacttcaggctgatccgcagcgcttccctcatggcataaggcagctggcaaaccacgtccacagtaaggggctcaaattgggaatctacgcggacgtgggcaataagacctgtgccggttttccgggatcattcgggtattatgacattgacgcccaaacgtttgctgattggggcgttgacctgctgaaattcgatggttgctactgtgacagcctcgaaaacctggcagacggctacaagcatatgtctctcgccctgaatagaaccggtcggccaatcgtatattcctgcgagtggcctctttacatgtggccatttcagaaaccgaactacacagaaattcgccagtattgcaatcattggaggaacttcgctgatatcgatgactcatgggcctccataaagagcatcttggactggaccagtcggaatcaggagcgaattgtggatgtcgcaggccctggaggatggaacgatccagacatgctggtgatcggcaattttggcctctcttgggaccagcaggttacccaaatggctctgtgggcaattatggccggtcctcttttcatgagcaacgatctgcgcgcgatctcaccacaggcaaaggccctgctccaagacaaagatgtgatagccatcaatcaggacccgttgggaaagcagggctaccagctgagaaaaggcgacaactttgaggtctgggaaaggcctttgagtggaatggcgtgggctgtggccattattaatcggcaagagatcggaggtccacgctcctatacaattcctgtagcatctcttggcaagggcgttgcctgtaacccagcttgcttcatcactcagcttctgccggtgaagagaaaactgggtttctacgaagctaccagcaggctccgatcccacatcaaccctacaggaaccgtcctcttgcagctggagaatacgatgcagacttcactgaaggacctcctg

SEQ ID NO: 1240 - protein, 398 aa, Artificial Sequence
  variant of human alpha-galactosidase A
LDNGLARTPPMGWLHWERFMCNLDCQEEPDSCISEKLFEEMAERMVTEGWKDAGYEYLCIDDCWMAPQRDSEGRLQADPQRFPHGIRQLANHVHSKGLKLGIYADVGNKTCAGFPGSFGYYDIDAQTFADWGVDLLKFDGCYCDSLENLADGYKHMSLALNRTGRPIVYSCEWPLYMWPFQKPNYTEIRQYCNHWRNFADIDDSWASIKSILDWTSRNQERIVDVAGPGGWNDPDMLVIGNFGLSWDQQVTQMALWAIMAGPLFMSNDLRAISPQAKALLQDKDVIAINQDPLGKQGYQLRKGDNFEVWERPLSGMAWAVAIINRQEIGGPRSYTIPVASLGKGVACNPACFITQLLPVKRKLGFYEATSRLRSHINPTGTVLLQLENTMQTSLKDLL

SEQ ID NO: 1241 - DNA, 1194 bp, Artificial Sequence
  variant of human alpha-galactosidase A
ctggataatggattggctagaacacctcctatggggtggcttcactgggagaggttcatgtgcaacctggactgtcaggaagaaccagacagctgcatctccgagaagctctttgaggaaatggccgaacgaatggtgactgagggctggaaagatgcaggttacgagtatctgtgtattgacgattgctggatggccccacaacgggattctgagggaagacttcaggctgatccgcagcgcttccctcatggcataaggcagctggcaaaccacgtccacagtaaggggctcaaattgggaatctacgcggacgtgggcaataagacctgtgccggttttccgggatcattcgggtattatgacattgacgcccaaacgtttgctgattggggcgttgacctgctgaaattcgatggttgctactgtgacagcctcgaaaacctggcagacggctacaagcatatgtctctcgccctgaatagaaccggtcggccaatcgtatattcctgcgagtggcctctttacatgtggccatttcagaaaccgaactacacagaaattcgccagtattgcaatcattggaggaacttcgctgatatcgatgactcatgggcctccataaagagcatcttggactggaccagtcggaatcaggagcgaattgtggatgtcgcaggccctggaggatggaacgatccagacatgctggtgatcggcaattttggcctctcttgggaccagcaggttacccaaatggctctgtgggcaattatggccggtcctcttttcatgagcaacgatctgcgcgcgatctcaccacaggcaaaggccctgctccaagacaaagatgtgatagccatcaatcaggacccgttgggaaagcagggctaccagctgagaaaaggcgacaactttgaggtctgggaaaggcctttgagtggaaacgcgtgggctgtggccattattaatcggcaagagatcggaggtccacgctcctatacaattcctgtagcatctcttggcaagggcgttgcctgtaacccagcttgcttcatcactcagcttctgccggtgaagagaaaactgggtttctacgaagctaccagcaggctccgatcccacatcaaccctacaggaaccgtcctcttgcagctggagaatacgatgcagacttcactgaaggacctcctg

SEQ ID NO: 1242 - protein, 398 aa, Artificial Sequence
  variant of human alpha-galactosidase A
LDNGLARTPPMGWLHWERFMCNLDCQEEPDSCISEKLFEEMAERMVTEGWKDAGYEYLCIDDCWMAPQRDSEGRLQADPQRFPHGIRQLANHVHSKGLKLGIYADVGNKTCAGFPGSFGYYDIDAQTFADWGVDLLKFDGCYCDSLENLADGYKHMSLALNRTGRPIVYSCEWPLYMWPFQKPNYTEIRQYCNHWRNFADIDDSWASIKSILDWTSRNQERIVDVAGPGGWNDPDMLVIGNFGLSWDQQVTQMALWAIMAGPLFMSNDLRAISPQAKALLQDKDVIAINQDPLGKQGYQLRKGDNFEVWERPLSGNAWAVAIINRQEIGGPRSYTIPVASLGKGVACNPACFITQLLPVKRKLGFYEATSRLRSHINPTGTVLLQLENTMQTSLKDLL

SEQ ID NO: 1243 - DNA, 1194 bp, Artificial Sequence
  variant of human alpha-galactosidase A
ctggataatggattggctagaacacctcctatggggtggcttcactgggagaggttcatgtgcaacctggactgtcaggaagaaccagacagctgcatctccgagaagctctttgaggaaatggccgaacgaatggtgactgagggctggaaagatgcaggttacgagtatctgtgtattgacgattgctggatggccccacaacgggattctgagggaagacttcaggctgatccgcagcgcttccctcatggcataaggcagctggcaaaccacgtccacagtaaggggctcaaattgggaatctacgcggacgtgggcaataagacctgtgccggttttccgggatcattcgggtattatgacattgacgcccaaacgtttgctgattggggcgttgacctgctgaaattcgatggttgctactgtgacagcctcgaaaacctggcagacggctacaagcatatgtctctcgccctgaatagaaccggtcggccaatcgtatattcctgcgagtggcctctttacatgtggccatttcagaaaccgaactacacagaaattcgccagtattgcaatcattggaggaacttcgctgatatcgatgactcatgggcctccataaagagcatcttggactggaccagtcggaatcaggagcgaattgtggatgtcgcaggccctggaggatggaacgatccagacatgctggtgatcggcaattttggcctctcttgggaccagcaggttacccaaatggctctgtgggcaattatggccggtcctcttttcatgagcaacgatctgcgcgcgatctcaccacaggcaaaggccctgctccaagacaaagatgtgatagccatcaatcaggacccgttgggaaagcagggctaccagctgagaaaaggcgacaactttgaggtctgggaaaggcctttgagtggacctgcgtgggctgtggccattattaatcggcaagagatcggaggtccacgctcctatacaattcctgtagcatctcttggcaagggcgttgcctgtaacccagcttgcttcatcactcagcttctgccggtgaagagaaaactgggtttctacgaagctaccagcaggctccgatcccacatcaaccctacaggaaccgtcctcttgcagctggagaatacgatgcagacttcactgaaggacctcctg

SEQ ID NO: 1244 - protein, 398 aa, Artificial Sequence
  variant of human alpha-galactosidase A
LDNGLARTPPMGWLHWERFMCNLDCQEEPDSCISEKLFEEMAERMVTEGWKDAGYEYLCIDDCWMAPQRDSEGRLQADPQRFPHGIRQLANHVHSKGLKLGIYADVGNKTCAGFPGSFGYYDIDAQTFADWGVDLLKFDGCYCDSLENLADGYKHMSLALNRTGRPIVYSCEWPLYMWPFQKPNYTEIRQYCNHWRNFADIDDSWASIKSILDWTSRNQERIVDVAGPGGWNDPDMLVIGNFGLSWDQQVTQMALWAIMAGPLFMSNDLRAISPQAKALLQDKDVIAINQDPLGKQGYQLRKGDNFEVWERPLSGPAWAVAIINRQEIGGPRSYTIPVASLGKGVACNPACFITQLLPVKRKLGFYEATSRLRSHINPTGTVLLQLENTMQTSLKDLL

SEQ ID NO: 1245 - DNA, 1194 bp, Artificial Sequence
  variant of human alpha-galactosidase A
ctggataatggattggctagaacacctcctatggggtggcttcactgggagaggttcatgtgcaacctggactgtcaggaagaaccagacagctgcatctccgagaagctctttgaggaaatggccgaacgaatggtgactgagggctggaaagatgcaggttacgagtatctgtgtattgacgattgctggatggccccacaacgggattctgagggaagacttcaggctgatccgcagcgcttccctcatggcataaggcagctggcaaaccacgtccacagtaaggggctcaaattgggaatctacgcggacgtgggcaataagacctgtgccggttttccgggatcattcgggtattatgacattgacgcccaaacgtttgctgattggggcgttgacctgctgaaattcgatggttgctactgtgacagcctcgaaaacctggcagacggctacaagcatatgtctctcgccctgaatagaaccggtcggccaatcgtatattcctgcgagtggcctctttacatgtggccatttcagaaaccgaactacacagaaattcgccagtattgcaatcattggaggaacttcgctgatatcgatgactcatgggcctccataaagagcatcttggactggaccagtcggaatcaggagcgaattgtggatgtcgcaggccctggaggatggaacgatccagacatgctggtgatcggcaattttggcctctcttgggaccagcaggttacccaaatggctctgtgggcaattatggccggtcctcttttcatgagcaacgatctgcgcgcgatctcaccacaggcaaaggccctgctccaagacaaagatgtgatagccatcaatcaggacccgttgggaaagcagggctaccagctgagaaaaggcgacaactttgaggtctgggaaaggcctttgagtggacaggcgtgggctgtggccattattaatcggcaagagatcggaggtccacgctcctatacaattcctgtagcatctcttggcaagggcgttgcctgtaacccagcttgcttcatcactcagcttctgccggtgaagagaaaactgggtttctacgaagctaccagcaggctccgatcccacatcaaccctacaggaaccgtcctcttgcagctggagaatacgatgcagacttcactgaaggacctcctg

SEQ ID NO: 1246 - protein, 398 aa, Artificial Sequence
  variant of human alpha-galactosidase A
LDNGLARTPPMGWLHWERFMCNLDCQEEPDSCISEKLFEEMAERMVTEGWKDAGYEYLCIDDCWMAPQRDSEGRLQADPQRFPHGIRQLANHVHSKGLKLGIYADVGNKTCAGFPGSFGYYDIDAQTFADWGVDLLKFDGCYCDSLENLADGYKHMSLALNRTGRPIVYSCEWPLYMWPFQKPNYTEIRQYCNHWRNFADIDDSWASIKSILDWTSRNQERIVDVAGPGGWNDPDMLVIGNFGLSWDQQVTQMALWAIMAGPLFMSNDLRAISPQAKALLQDKDVIAINQDPLGKQGYQLRKGDNFEVWERPLSGQAWAVAIINRQEIGGPRSYTIPVASLGKGVACNPACFITQLLPVKRKLGFYEATSRLRSHINPTGTVLLQLENTMQTSLKDLL

SEQ ID NO: 1247 - DNA, 1194 bp, Artificial Sequence
  variant of human alpha-galactosidase A
ctggataatggattggctagaacacctcctatggggtggcttcactgggagaggttcatgtgcaacctggactgtcaggaagaaccagacagctgcatctccgagaagctctttgaggaaatggccgaacgaatggtgactgagggctggaaagatgcaggttacgagtatctgtgtattgacgattgctggatggccccacaacgggattctgagggaagacttcaggctgatccgcagcgcttccctcatggcataaggcagctggcaaaccacgtccacagtaaggggctcaaattgggaatctacgcggacgtgggcaataagacctgtgccggttttccgggatcattcgggtattatgacattgacgcccaaacgtttgctgattggggcgttgacctgctgaaattcgatggttgctactgtgacagcctcgaaaacctggcagacggctacaagcatatgtctctcgccctgaatagaaccggtcggccaatcgtatattcctgcgagtggcctctttacatgtggccatttcagaaaccgaactacacagaaattcgccagtattgcaatcattggaggaacttcgctgatatcgatgactcatgggcctccataaagagcatcttggactggaccagtcggaatcaggagcgaattgtggatgtcgcaggccctggaggatggaacgatccagacatgctggtgatcggcaattttggcctctcttgggaccagcaggttacccaaatggctctgtgggcaattatggccggtcctcttttcatgagcaacgatctgcgcgcgatctcaccacaggcaaaggccctgctccaagacaaagatgtgatagccatcaatcaggacccgttgggaaagcagggctaccagctgagaaaaggcgacaactttgaggtctgggaaaggcctttgagtggacgggcgtgggctgtggccattattaatcggcaagagatcggaggtccacgctcctatacaattcctgtagcatctcttggcaagggcgttgcctgtaacccagcttgcttcatcactcagcttctgccggtgaagagaaaactgggtttctacgaagctaccagcaggctccgatcccacatcaaccctacaggaaccgtcctcttgcagctggagaatacgatgcagacttcactgaaggacctcctg

SEQ ID NO: 1248 - protein, 398 aa, Artificial Sequence
  variant of human alpha-galactosidase A
LDNGLARTPPMGWLHWERFMCNLDCQEEPDSCISEKLFEEMAERMVTEGWKDAGYEYLCIDDCWMAPQRDSEGRLQADPQRFPHGIRQLANHVHSKGLKLGIYADVGNKTCAGFPGSFGYYDIDAQTFADWGVDLLKFDGCYCDSLENLADGYKHMSLALNRTGRPIVYSCEWPLYMWPFQKPNYTEIRQYCNHWRNFADIDDSWASIKSILDWTSRNQERIVDVAGPGGWNDPDMLVIGNFGLSWDQQVTQMALWAIMAGPLFMSNDLRAISPQAKALLQDKDVIAINQDPLGKQGYQLRKGDNFEVWERPLSGRAWAVAIINRQEIGGPRSYTIPVASLGKGVACNPACFITQLLPVKRKLGFYEATSRLRSHINPTGTVLLQLENTMQTSLKDLL

SEQ ID NO: 1249 - DNA, 1194 bp, Artificial Sequence
  variant of human alpha-galactosidase A
ctggataatggattggctagaacacctcctatggggtggcttcactgggagaggttcatgtgcaacctggactgtcaggaagaaccagacagctgcatctccgagaagctctttgaggaaatggccgaacgaatggtgactgagggctggaaagatgcaggttacgagtatctgtgtattgacgattgctggatggccccacaacgggattctgagggaagacttcaggctgatccgcagcgcttccctcatggcataaggcagctggcaaaccacgtccacagtaaggggctcaaattgggaatctacgcggacgtgggcaataagacctgtgccggttttccgggatcattcgggtattatgacattgacgcccaaacgtttgctgattggggcgttgacctgctgaaattcgatggttgctactgtgacagcctcgaaaacctggcagacggctacaagcatatgtctctcgccctgaatagaaccggtcggccaatcgtatattcctgcgagtggcctctttacatgtggccatttcagaaaccgaactacacagaaattcgccagtattgcaatcattggaggaacttcgctgatatcgatgactcatgggcctccataaagagcatcttggactggaccagtcggaatcaggagcgaattgtggatgtcgcaggccctggaggatggaacgatccagacatgctggtgatcggcaattttggcctctcttgggaccagcaggttacccaaatggctctgtgggcaattatggccggtcctcttttcatgagcaacgatctgcgcgcgatctcaccacaggcaaaggccctgctccaagacaaagatgtgatagccatcaatcaggacccgttgggaaagcagggctaccagctgagaaaaggcgacaactttgaggtctgggaaaggcctttgagtggatcggcgtgggctgtggccattattaatcggcaagagatcggaggtccacgctcctatacaattcctgtagcatctcttggcaagggcgttgcctgtaacccagcttgcttcatcactcagcttctgccggtgaagagaaaactgggtttctacgaagctaccagcaggctccgatcccacatcaaccctacaggaaccgtcctcttgcagctggagaatacgatgcagacttcactgaaggacctcctg

SEQ ID NO: 1250 - protein, 398 aa, Artificial Sequence
  variant of human alpha-galactosidase A
LDNGLARTPPMGWLHWERFMCNLDCQEEPDSCISEKLFEEMAERMVTEGWKDAGYEYLCIDDCWMAPQRDSEGRLQADPQRFPHGIRQLANHVHSKGLKLGIYADVGNKTCAGFPGSFGYYDIDAQTFADWGVDLLKFDGCYCDSLENLADGYKHMSLALNRTGRPIVYSCEWPLYMWPFQKPNYTEIRQYCNHWRNFADIDDSWASIKSILDWTSRNQERIVDVAGPGGWNDPDMLVIGNFGLSWDQQVTQMALWAIMAGPLFMSNDLRAISPQAKALLQDKDVIAINQDPLGKQGYQLRKGDNFEVWERPLSGSAWAVAIINRQEIGGPRSYTIPVASLGKGVACNPACFITQLLPVKRKLGFYEATSRLRSHINPTGTVLLQLENTMQTSLKDLL

SEQ ID NO: 1251 - DNA, 1194 bp, Artificial Sequence
  variant of human alpha-galactosidase A
ctggataatggattggctagaacacctcctatggggtggcttcactgggagaggttcatgtgcaacctggactgtcaggaagaaccagacagctgcatctccgagaagctctttgaggaaatggccgaacgaatggtgactgagggctggaaagatgcaggttacgagtatctgtgtattgacgattgctggatggccccacaacgggattctgagggaagacttcaggctgatccgcagcgcttccctcatggcataaggcagctggcaaaccacgtccacagtaaggggctcaaattgggaatctacgcggacgtgggcaataagacctgtgccggttttccgggatcattcgggtattatgacattgacgcccaaacgtttgctgattggggcgttgacctgctgaaattcgatggttgctactgtgacagcctcgaaaacctggcagacggctacaagcatatgtctctcgccctgaatagaaccggtcggccaatcgtatattcctgcgagtggcctctttacatgtggccatttcagaaaccgaactacacagaaattcgccagtattgcaatcattggaggaacttcgctgatatcgatgactcatgggcctccataaagagcatcttggactggaccagtcggaatcaggagcgaattgtggatgtcgcaggccctggaggatggaacgatccagacatgctggtgatcggcaattttggcctctcttgggaccagcaggttacccaaatggctctgtgggcaattatggccggtcctcttttcatgagcaacgatctgcgcgcgatctcaccacaggcaaaggccctgctccaagacaaagatgtgatagccatcaatcaggacccgttgggaaagcagggctaccagctgagaaaaggcgacaactttgaggtctgggaaaggcctttgagtggaacggcgtgggctgtggccattattaatcggcaagagatcggaggtccacgctcctatacaattcctgtagcatctcttggcaagggcgttgcctgtaacccagcttgcttcatcactcagcttctgccggtgaagagaaaactgggtttctacgaagctaccagcaggctccgatcccacatcaaccctacaggaaccgtcctcttgcagctggagaatacgatgcagacttcactgaaggacctcctg

SEQ ID NO: 1252 - protein, 398 aa, Artificial Sequence
  variant of human alpha-galactosidase A
LDNGLARTPPMGWLHWERFMCNLDCQEEPDSCISEKLFEEMAERMVTEGWKDAGYEYLCIDDCWMAPQRDSEGRLQADPQRFPHGIRQLANHVHSKGLKLGIYADVGNKTCAGFPGSFGYYDIDAQTFADWGVDLLKFDGCYCDSLENLADGYKHMSLALNRTGRPIVYSCEWPLYMWPFQKPNYTEIRQYCNHWRNFADIDDSWASIKSILDWTSRNQERIVDVAGPGGWNDPDMLVIGNFGLSWDQQVTQMALWAIMAGPLFMSNDLRAISPQAKALLQDKDVIAINQDPLGKQGYQLRKGDNFEVWERPLSGTAWAVAIINRQEIGGPRSYTIPVASLGKGVACNPACFITQLLPVKRKLGFYEATSRLRSHINPTGTVLLQLENTMQTSLKDLL

SEQ ID NO: 1253 - DNA, 1194 bp, Artificial Sequence
  variant of human alpha-galactosidase A
ctggataatggattggctagaacacctcctatggggtggcttcactgggagaggttcatgtgcaacctggactgtcaggaagaaccagacagctgcatctccgagaagctctttgaggaaatggccgaacgaatggtgactgagggctggaaagatgcaggttacgagtatctgtgtattgacgattgctggatggccccacaacgggattctgagggaagacttcaggctgatccgcagcgcttccctcatggcataaggcagctggcaaaccacgtccacagtaaggggctcaaattgggaatctacgcggacgtgggcaataagacctgtgccggttttccgggatcattcgggtattatgacattgacgcccaaacgtttgctgattggggcgttgacctgctgaaattcgatggttgctactgtgacagcctcgaaaacctggcagacggctacaagcatatgtctctcgccctgaatagaaccggtcggccaatcgtatattcctgcgagtggcctctttacatgtggccatttcagaaaccgaactacacagaaattcgccagtattgcaatcattggaggaacttcgctgatatcgatgactcatgggcctccataaagagcatcttggactggaccagtcggaatcaggagcgaattgtggatgtcgcaggccctggaggatggaacgatccagacatgctggtgatcggcaattttggcctctcttgggaccagcaggttacccaaatggctctgtgggcaattatggccggtcctcttttcatgagcaacgatctgcgcgcgatctcaccacaggcaaaggccctgctccaagacaaagatgtgatagccatcaatcaggacccgttgggaaagcagggctaccagctgagaaaaggcgacaactttgaggtctgggaaaggcctttgagtggagtggcgtgggctgtggccattattaatcggcaagagatcggaggtccacgctcctatacaattcctgtagcatctcttggcaagggcgttgcctgtaacccagcttgcttcatcactcagcttctgccggtgaagagaaaactgggtttctacgaagctaccagcaggctccgatcccacatcaaccctacaggaaccgtcctcttgcagctggagaatacgatgcagacttcactgaaggacctcctg

SEQ ID NO: 1254 - protein, 398 aa, Artificial Sequence
  variant of human alpha-galactosidase A
LDNGLARTPPMGWLHWERFMCNLDCQEEPDSCISEKLFEEMAERMVTEGWKDAGYEYLCIDDCWMAPQRDSEGRLQADPQRFPHGIRQLANHVHSKGLKLGIYADVGNKTCAGFPGSFGYYDIDAQTFADWGVDLLKFDGCYCDSLENLADGYKHMSLALNRTGRPIVYSCEWPLYMWPFQKPNYTEIRQYCNHWRNFADIDDSWASIKSILDWTSRNQERIVDVAGPGGWNDPDMLVIGNFGLSWDQQVTQMALWAIMAGPLFMSNDLRAISPQAKALLQDKDVIAINQDPLGKQGYQLRKGDNFEVWERPLSGVAWAVAIINRQEIGGPRSYTIPVASLGKGVACNPACFITQLLPVKRKLGFYEATSRLRSHINPTGTVLLQLENTMQTSLKDLL

SEQ ID NO: 1255 - DNA, 1194 bp, Artificial Sequence
  variant of human alpha-galactosidase A
ctggataatggattggctagaacacctcctatggggtggcttcactgggagaggttcatgtgcaacctggactgtcaggaagaaccagacagctgcatctccgagaagctctttgaggaaatggccgaacgaatggtgactgagggctggaaagatgcaggttacgagtatctgtgtattgacgattgctggatggccccacaacgggattctgagggaagacttcaggctgatccgcagcgcttccctcatggcataaggcagctggcaaaccacgtccacagtaaggggctcaaattgggaatctacgcggacgtgggcaataagacctgtgccggttttccgggatcattcgggtattatgacattgacgcccaaacgtttgctgattggggcgttgacctgctgaaattcgatggttgctactgtgacagcctcgaaaacctggcagacggctacaagcatatgtctctcgccctgaatagaaccggtcggccaatcgtatattcctgcgagtggcctctttacatgtggccatttcagaaaccgaactacacagaaattcgccagtattgcaatcattggaggaacttcgctgatatcgatgactcatgggcctccataaagagcatcttggactggaccagtcggaatcaggagcgaattgtggatgtcgcaggccctggaggatggaacgatccagacatgctggtgatcggcaattttggcctctcttgggaccagcaggttacccaaatggctctgtgggcaattatggccggtcctcttttcatgagcaacgatctgcgcgcgatctcaccacaggcaaaggccctgctccaagacaaagatgtgatagccatcaatcaggacccgttgggaaagcagggctaccagctgagaaaaggcgacaactttgaggtctgggaaaggcctttgagtggatgggcgtgggctgtggccattattaatcggcaagagatcggaggtccacgctcctatacaattcctgtagcatctcttggcaagggcgttgcctgtaacccagcttgcttcatcactcagcttctgccggtgaagagaaaactgggtttctacgaagctaccagcaggctccgatcccacatcaaccctacaggaaccgtcctcttgcagctggagaatacgatgcagacttcactgaaggacctcctg

SEQ ID NO: 1256 - protein, 398 aa, Artificial Sequence
  variant of human alpha-galactosidase A
LDNGLARTPPMGWLHWERFMCNLDCQEEPDSCISEKLFEEMAERMVTEGWKDAGYEYLCIDDCWMAPQRDSEGRLQADPQRFPHGIRQLANHVHSKGLKLGIYADVGNKTCAGFPGSFGYYDIDAQTFADWGVDLLKFDGCYCDSLENLADGYKHMSLALNRTGRPIVYSCEWPLYMWPFQKPNYTEIRQYCNHWRNFADIDDSWASIKSILDWTSRNQERIVDVAGPGGWNDPDMLVIGNFGLSWDQQVTQMALWAIMAGPLFMSNDLRAISPQAKALLQDKDVIAINQDPLGKQGYQLRKGDNFEVWERPLSGWAWAVAIINRQEIGGPRSYTIPVASLGKGVACNPACFITQLLPVKRKLGFYEATSRLRSHINPTGTVLLQLENTMQTSLKDLL

SEQ ID NO: 1257 - DNA, 1194 bp, Artificial Sequence
  variant of human alpha-galactosidase A
ctggataatggattggctagaacacctcctatggggtggcttcactgggagaggttcatgtgcaacctggactgtcaggaagaaccagacagctgcatctccgagaagctctttgaggaaatggccgaacgaatggtgactgagggctggaaagatgcaggttacgagtatctgtgtattgacgattgctggatggccccacaacgggattctgagggaagacttcaggctgatccgcagcgcttccctcatggcataaggcagctggcaaaccacgtccacagtaaggggctcaaattgggaatctacgcggacgtgggcaataagacctgtgccggttttccgggatcattcgggtattatgacattgacgcccaaacgtttgctgattggggcgttgacctgctgaaattcgatggttgctactgtgacagcctcgaaaacctggcagacggctacaagcatatgtctctcgccctgaatagaaccggtcggccaatcgtatattcctgcgagtggcctctttacatgtggccatttcagaaaccgaactacacagaaattcgccagtattgcaatcattggaggaacttcgctgatatcgatgactcatgggcctccataaagagcatcttggactggaccagtcggaatcaggagcgaattgtggatgtcgcaggccctggaggatggaacgatccagacatgctggtgatcggcaattttggcctctcttgggaccagcaggttacccaaatggctctgtgggcaattatggccggtcctcttttcatgagcaacgatctgcgcgcgatctcaccacaggcaaaggccctgctccaagacaaagatgtgatagccatcaatcaggacccgttgggaaagcagggctaccagctgagaaaaggcgacaactttgaggtctgggaaaggcctttgagtggatatgcgtgggctgtggccattattaatcggcaagagatcggaggtccacgctcctatacaattcctgtagcatctcttggcaagggcgttgcctgtaacccagcttgcttcatcactcagcttctgccggtgaagagaaaactgggtttctacgaagctaccagcaggctccgatcccacatcaaccctacaggaaccgtcctcttgcagctggagaatacgatgcagacttcactgaaggacctcctg

SEQ ID NO: 1258 - protein, 398 aa, Artificial Sequence
  variant of human alpha-galactosidase A
LDNGLARTPPMGWLHWERFMCNLDCQEEPDSCISEKLFEEMAERMVTEGWKDAGYEYLCIDDCWMAPQRDSEGRLQADPQRFPHGIRQLANHVHSKGLKLGIYADVGNKTCAGFPGSFGYYDIDAQTFADWGVDLLKFDGCYCDSLENLADGYKHMSLALNRTGRPIVYSCEWPLYMWPFQKPNYTEIRQYCNHWRNFADIDDSWASIKSILDWTSRNQERIVDVAGPGGWNDPDMLVIGNFGLSWDQQVTQMALWAIMAGPLFMSNDLRAISPQAKALLQDKDVIAINQDPLGKQGYQLRKGDNFEVWERPLSGYAWAVAIINRQEIGGPRSYTIPVASLGKGVACNPACFITQLLPVKRKLGFYEATSRLRSHINPTGTVLLQLENTMQTSLKDLL

SEQ ID NO: 1259 - DNA, 1194 bp, Artificial Sequence
  variant of human alpha-galactosidase A
ctggataatggattggctagaacacctcctatggggtggcttcactgggagaggttcatgtgcaacctggactgtcaggaagaaccagacagctgcatctccgagaagctctttgcggaaatggccgaacgaatggtgactgagggctggaaagatgcaggttacgagtatctgtgtattgacgattgctggatggccccacaacgggattctgagggaagacttcaggctgatccgcagcgcttccctcatggcataaggcagctggcaaaccacgtccacagtaaggggctcaaattgggaatctacgcggacgtgggcaataagacctgtgccggttttccgggatcattcgggtattatgacattgacgcccaaacgtttgctgattggggcgttgacctgctgaaattcgatggttgctactgtgacagcctcgaaaacctggcagacggctacaagcatatgtctctcgccctgaatagaaccggtcggccaatcgtatattcctgcgagtggcctctttacatgtggccatttcagaaaccgaactacacagaaattcgccagtattgcaatcattggaggaacttcgctgatatcgatgactcatgggcctccataaagagcatcttggactggaccagtcggaatcaggagcgaattgtggatgtcgcaggccctggaggatggaacgatccagacatgctggtgatcggcaattttggcctctcttgggaccagcaggttacccaaatggctctgtgggcaattatggccggtcctcttttcatgagcaacgatctgcgcgcgatctcaccacaggcaaaggccctgctccaagacaaagatgtgatagccatcaatcaggacccgttgggaaagcagggctaccagctgagaaaaggcgacaactttgaggtctgggaaaggcctttgagtggagatgcgtgggctgtggccattattaatcggcaagagatcggaggtccacgctcctatacaattcctgtagcatctcttggcaagggcgttgcctgtaacccagcttgcttcatcactcagcttctgccggtgaagagaaaactgggtttctacgaagctaccagcaggctccgatcccacatcaaccctacaggaaccgtcctcttgcagctggagaatacgatgcagacttcactgaaggacctcctg

SEQ ID NO: 1260 - protein, 398 aa, Artificial Sequence
  variant of human alpha-galactosidase A
LDNGLARTPPMGWLHWERFMCNLDCQEEPDSCISEKLFAEMAERMVTEGWKDAGYEYLCIDDCWMAPQRDSEGRLQADPQRFPHGIRQLANHVHSKGLKLGIYADVGNKTCAGFPGSFGYYDIDAQTFADWGVDLLKFDGCYCDSLENLADGYKHMSLALNRTGRPIVYSCEWPLYMWPFQKPNYTEIRQYCNHWRNFADIDDSWASIKSILDWTSRNQERIVDVAGPGGWNDPDMLVIGNFGLSWDQQVTQMALWAIMAGPLFMSNDLRAISPQAKALLQDKDVIAINQDPLGKQGYQLRKGDNFEVWERPLSGDAWAVAIINRQEIGGPRSYTIPVASLGKGVACNPACFITQLLPVKRKLGFYEATSRLRSHINPTGTVLLQLENTMQTSLKDLL

SEQ ID NO: 1261 - DNA, 1194 bp, Artificial Sequence
  variant of human alpha-galactosidase A
ctggataatggattggctagaacacctcctatggggtggcttcactgggagaggttcatgtgcaacctggactgtcaggaagaaccagacagctgcatctccgagaagctcttttgtgaaatggccgaacgaatggtgactgagggctggaaagatgcaggttacgagtatctgtgtattgacgattgctggatggccccacaacgggattctgagggaagacttcaggctgatccgcagcgcttccctcatggcataaggcagctggcaaaccacgtccacagtaaggggctcaaattgggaatctacgcggacgtgggcaataagacctgtgccggttttccgggatcattcgggtattatgacattgacgcccaaacgtttgctgattggggcgttgacctgctgaaattcgatggttgctactgtgacagcctcgaaaacctggcagacggctacaagcatatgtctctcgccctgaatagaaccggtcggccaatcgtatattcctgcgagtggcctctttacatgtggccatttcagaaaccgaactacacagaaattcgccagtattgcaatcattggaggaacttcgctgatatcgatgactcatgggcctccataaagagcatcttggactggaccagtcggaatcaggagcgaattgtggatgtcgcaggccctggaggatggaacgatccagacatgctggtgatcggcaattttggcctctcttgggaccagcaggttacccaaatggctctgtgggcaattatggccggtcctcttttcatgagcaacgatctgcgcgcgatctcaccacaggcaaaggccctgctccaagacaaagatgtgatagccatcaatcaggacccgttgggaaagcagggctaccagctgagaaaaggcgacaactttgaggtctgggaaaggcctttgagtggagatgcgtgggctgtggccattattaatcggcaagagatcggaggtccacgctcctatacaattcctgtagcatctcttggcaagggcgttgcctgtaacccagcttgcttcatcactcagcttctgccggtgaagagaaaactgggtttctacgaagctaccagcaggctccgatcccacatcaaccctacaggaaccgtcctcttgcagctggagaatacgatgcagacttcactgaaggacctcctg

SEQ ID NO: 1262 - protein, 398 aa, Artificial Sequence
  variant of human alpha-galactosidase A
LDNGLARTPPMGWLHWERFMCNLDCQEEPDSCISEKLFCEMAERMVTEGWKDAGYEYLCIDDCWMAPQRDSEGRLQADPQRFPHGIRQLANHVHSKGLKLGIYADVGNKTCAGFPGSFGYYDIDAQTFADWGVDLLKFDGCYCDSLENLADGYKHMSLALNRTGRPIVYSCEWPLYMWPFQKPNYTEIRQYCNHWRNFADIDDSWASIKSILDWTSRNQERIVDVAGPGGWNDPDMLVIGNFGLSWDQQVTQMALWAIMAGPLFMSNDLRAISPQAKALLQDKDVIAINQDPLGKQGYQLRKGDNFEVWERPLSGDAWAVAIINRQEIGGPRSYTIPVASLGKGVACNPACFITQLLPVKRKLGFYEATSRLRSHINPTGTVLLQLENTMQTSLKDLL

SEQ ID NO: 1263 - DNA, 1194 bp, Artificial Sequence
  variant of human alpha-galactosidase A
ctggataatggattggctagaacacctcctatggggtggcttcactgggagaggttcatgtgcaacctggactgtcaggaagaaccagacagctgcatctccgagaagctctttgatgaaatggccgaacgaatggtgactgagggctggaaagatgcaggttacgagtatctgtgtattgacgattgctggatggccccacaacgggattctgagggaagacttcaggctgatccgcagcgcttccctcatggcataaggcagctggcaaaccacgtccacagtaaggggctcaaattgggaatctacgcggacgtgggcaataagacctgtgccggttttccgggatcattcgggtattatgacattgacgcccaaacgtttgctgattggggcgttgacctgctgaaattcgatggttgctactgtgacagcctcgaaaacctggcagacggctacaagcatatgtctctcgccctgaatagaaccggtcggccaatcgtatattcctgcgagtggcctctttacatgtggccatttcagaaaccgaactacacagaaattcgccagtattgcaatcattggaggaacttcgctgatatcgatgactcatgggcctccataaagagcatcttggactggaccagtcggaatcaggagcgaattgtggatgtcgcaggccctggaggatggaacgatccagacatgctggtgatcggcaattttggcctctcttgggaccagcaggttacccaaatggctctgtgggcaattatggccggtcctcttttcatgagcaacgatctgcgcgcgatctcaccacaggcaaaggccctgctccaagacaaagatgtgatagccatcaatcaggacccgttgggaaagcagggctaccagctgagaaaaggcgacaactttgaggtctgggaaaggcctttgagtggagatgcgtgggctgtggccattattaatcggcaagagatcggaggtccacgctcctatacaattcctgtagcatctcttggcaagggcgttgcctgtaacccagcttgcttcatcactcagcttctgccggtgaagagaaaactgggtttctacgaagctaccagcaggctccgatcccacatcaaccctacaggaaccgtcctcttgcagctggagaatacgatgcagacctcactgaaggacctcctg

SEQ ID NO: 1264 - protein, 398 aa, Artificial Sequence
  variant of human alpha-galactosidase A
LDNGLARTPPMGWLHWERFMCNLDCQEEPDSCISEKLFDEMAERMVTEGWKDAGYEYLCIDDCWMAPQRDSEGRLQADPQRFPHGIRQLANHVHSKGLKLGIYADVGNKTCAGFPGSFGYYDIDAQTFADWGVDLLKFDGCYCDSLENLADGYKHMSLALNRTGRPIVYSCEWPLYMWPFQKPNYTEIRQYCNHWRNFADIDDSWASIKSILDWTSRNQERIVDVAGPGGWNDPDMLVIGNFGLSWDQQVTQMALWAIMAGPLFMSNDLRAISPQAKALLQDKDVIAINQDPLGKQGYQLRKGDNFEVWERPLSGDAWAVAIINRQEIGGPRSYTIPVASLGKGVACNPACFITQLLPVKRKLGFYEATSRLRSHINPTGTVLLQLENTMQTSLKDLL

SEQ ID NO: 1265 - DNA, 1194 bp, Artificial Sequence
  variant of human alpha-galactosidase A
ctggataatggattggctagaacacctcctatggggtggcttcactgggagaggttcatgtgcaacctggactgtcaggaagaaccagacagctgcatctccgagaagctctttttcgaaatggccgaacgaatggtgactgagggctggaaagatgcaggttacgagtatctgtgtattgacgattgctggatggccccacaacgggattctgagggaagacttcaggctgatccgcagcgcttccctcatggcataaggcagctggcaaaccacgtccacagtaaggggctcaaattgggaatctacgcggacgtgggcaataagacctgtgccggttttccgggatcattcgggtattatgacattgacgcccaaacgtttgctgattggggcgttgacctgctgaaattcgatggttgctactgtgacagcctcgaaaacctggcagacggctacaagcatatgtctctcgccctgaatagaaccggtcggccaatcgtatattcctgcgagtggcctctttacatgtggccatttcagaaaccgaactacacagaaattcgccagtattgcaatcattggaggaacttcgctgatatcgatgactcatgggcctccataaagagcatcttggactggaccagtcggaatcaggagcgaattgtggatgtcgcaggccctggaggatggaacgatccagacatgctggtgatcggcaattttggcctctcttgggaccagcaggttacccaaatggctctgtgggcaattatggccggtcctcttttcatgagcaacgatctgcgcgcgatctcaccacaggcaaaggccctgctccaagacaaagatgtgatagccatcaatcaggacccgttgggaaagcagggctaccagctgagaaaaggcgacaactttgaggtctgggaaaggcctttgagtggagatgcgtgggctgtggccattattaatcggcaagagatcggaggtccacgctcctatacaattcctgtagcatctcttggcaagggcgttgcctgtaacccagcttgcttcatcactcagcttctgccggtgaagagaaaactgggtttctacgaagctaccagcaggctccgatcccacatcaaccctacaggaaccgtcctcttgcagctggagaatacgatgcagacttcactgaaggacctcctg

SEQ ID NO: 1266 - protein, 398 aa, Artificial Sequence
  variant of human alpha-galactosidase A
LDNGLARTPPMGWLHWERFMCNLDCQEEPDSCISEKLFFEMAERMVTEGWKDAGYEYLCIDDCWMAPQRDSEGRLQADPQRFPHGIRQLANHVHSKGLKLGIYADVGNKTCAGFPGSFGYYDIDAQTFADWGVDLLKFDGCYCDSLENLADGYKHMSLALNRTGRPIVYSCEWPLYMWPFQKPNYTEIRQYCNHWRNFADIDDSWASIKSILDWTSRNQERIVDVAGPGGWNDPDMLVIGNFGLSWDQQVTQMALWAIMAGPLFMSNDLRAISPQAKALLQDKDVIAINQDPLGKQGYQLRKGDNFEVWERPLSGDAWAVAIINRQEIGGPRSYTIPVASLGKGVACNPACFITQLLPVKRKLGFYEATSRLRSHINPTGTVLLQLENTMQTSLKDLL

SEQ ID NO: 1267 - DNA, 1194 bp, Artificial Sequence
  variant of human alpha-galactosidase A
ctggataatggattggctagaacacctcctatggggtggcttcactgggagaggttcatgtgcaacctggactgtcaggaagaaccagacagctgcatctccgagaagctctttggtgaaatggccgaacgaatggtgactgagggctggaaagatgcaggttacgagtatctgtgtattgacgattgctggatggccccacaacgggattctgagggaagacttcaggctgatccgcagcgcttccctcatggcataaggcagctggcaaaccacgtccacagtaaggggctcaaattgggaatctacgcggacgtgggcaataagacctgtgccggttttccgggatcattcgggtattatgacattgacgcccaaacgtttgctgattggggcgttgacctgctgaaattcgatggttgctactgtgacagcctcgaaaacctggcagacggctacaagcatatgtctctcgccctgaatagaaccggtcggccaatcgtatattcctgcgagtggcctctttacatgtggccatttcagaaaccgaactacacagaaattcgccagtattgcaatcattggaggaacttcgctgatatcgatgactcatgggcctccataaagagcatcttggactggaccagtcggaatcaggagcgaattgtggatgtcgcaggccctggaggatggaacgatccagacatgctggtgatcggcaattttggcctctcttgggaccagcaggttacccaaatggctctgtgggcaattatggccggtcctcttttcatgagcaacgatctgcgcgcgatctcaccacaggcaaaggccctgctccaagacaaagatgtgatagccatcaatcaggacccgttgggaaagcagggctaccagctgagaaaaggcgacaactttgaggtctgggaaaggcctttgagtggagatgcgtgggctgtggccattattaatcggcaagagatcggaggtccacgctcctatacaattcctgtagcatctcttggcaagggcgttgcctgtaacccagcttgcttcatcactcagcttctgccggtgaagagaaaactgggtttctacgaagctaccagcaggctccgatcccacatcaaccctacaggaaccgtcctcttgcagctggagaatacgatgcagacttcactgaaggacctcctg

SEQ ID NO: 1268 - protein, 398 aa, Artificial Sequence
  variant of human alpha-galactosidase A
LDNGLARTPPMGWLHWERFMCNLDCQEEPDSCISEKLFGEMAERMVTEGWKDAGYEYLCIDDCWMAPQRDSEGRLQADPQRFPHGIRQLANHVHSKGLKLGIYADVGNKTCAGFPGSFGYYDIDAQTFADWGVDLLKFDGCYCDSLENLADGYKHMSLALNRTGRPIVYSCEWPLYMWPFQKPNYTEIRQYCNHWRNFADIDDSWASIKSILDWTSRNQERIVDVAGPGGWNDPDMLVIGNFGLSWDQQVTQMALWAIMAGPLFMSNDLRAISPQAKALLQDKDVIAINQDPLGKQGYQLRKGDNFEVWERPLSGDAWAVAIINRQEIGGPRSYTIPVASLGKGVACNPACFITQLLPVKRKLGFYEATSRLRSHINPTGTVLLQLENTMQTSLKDLL

SEQ ID NO: 1269 - DNA, 1194 bp, Artificial Sequence
  variant of human alpha-galactosidase A
ctggataatggattggctagaacacctcctatggggtggcttcactgggagaggttcatgtgcaacctggactgtcaggaagaaccagacagctgcatctccgagaagctctttcatgaaatggccgaacgaatggtgactgagggctggaaagatgcaggttacgagtatctgtgtattgacgattgctggatggccccacaacgggattctgagggaagacttcaggctgatccgcagcgcttccctcatggcataaggcagctggcaaaccacgtccacagtaaggggctcaaattgggaatctacgcggacgtgggcaataagacctgtgccggttttccgggatcattcgggtattatgacattgacgcccaaacgtttgctgattggggcgttgacctgctgaaattcgatggttgctactgtgacagcctcgaaaacctggcagacggctacaagcatatgtctctcgccctgaatagaaccggtcggccaatcgtatattcctgcgagtggcctctttacatgtggccatttcagaaaccgaactacacagaaattcgccagtattgcaatcattggaggaacttcgctgatatcgatgactcatgggcctccataaagagcatcttggactggaccagtcggaatcaggagcgaattgtggatgtcgcaggccctggaggatggaacgatccagacatgctggtgatcggcaattttggcctctcttgggaccagcaggttacccaaatggctctgtgggcaattatggccggtcctcttttcatgagcaacgatctgcgcgcgatctcaccacaggcaaaggccctgctccaagacaaagatgtgatagccatcaatcaggacccgttgggaaagcagggctaccagctgagaaaaggcgacaactttgaggtctgggaaaggcctttgagtggagatgcgtgggctgtggccattattaatcggcaagagatcggaggtccacgctcctatacaattcctgtagcatctcttggcaagggcgttgcctgtaacccagcttgcttcatcactcagcttctgccggtgaagagaaaactgggtttctacgaagctaccagcaggctccgatcccacatcaaccctacaggaaccgtcctcttgcagctggagaatacgatgcagacttcactgaaggacctcctg

SEQ ID NO: 1270 - protein, 398 aa, Artificial Sequence
  variant of human alpha-galactosidase A
LDNGLARTPPMGWLHWERFMCNLDCQEEPDSCISEKLFHEMAERMVTEGWKDAGYEYLCIDDCWMAPQRDSEGRLQADPQRFPHGIRQLANHVHSKGLKLGIYADVGNKTCAGFPGSFGYYDIDAQTFADWGVDLLKFDGCYCDSLENLADGYKHMSLALNRTGRPIVYSCEWPLYMWPFQKPNYTEIRQYCNHWRNFADIDDSWASIKSILDWTSRNQERIVDVAGPGGWNDPDMLVIGNFGLSWDQQVTQMALWAIMAGPLFMSNDLRAISPQAKALLQDKDVIAINQDPLGKQGYQLRKGDNFEVWERPLSGDAWAVAIINRQEIGGPRSYTIPVASLGKGVACNPACFITQLLPVKRKLGFYEATSRLRSHINPTGTVLLQLENTMQTSLKDLL

SEQ ID NO: 1271 - DNA, 1194 bp, Artificial Sequence
  variant of human alpha-galactosidase A
ctggataatggattggctagaacacctcctatggggtggcttcactgggagaggttcatgtgcaacctggactgtcaggaagaaccagacagctgcatctccgagaagctctttattgaaatggccgaacgaatggtgactgagggctggaaagatgcaggttacgagtatctgtgtattgacgattgctggatggccccacaacgggattctgagggaagacttcaggctgatccgcagcgcttccctcatggcataaggcagctggcaaaccacgtccacagtaaggggctcaaattgggaatctacgcggacgtgggcaataagacctgtgccggttttccgggatcattcgggtattatgacattgacgcccaaacgtttgctgattggggcgttgacctgctgaaattcgatggttgctactgtgacagcctcgaaaacctggcagacggctacaagcatatgtctctcgccctgaatagaaccggtcggccaatcgtatattcctgcgagtggcctctttacatgtggccatttcagaaaccgaactacacagaaattcgccagtattgcaatcattggaggaacttcgctgatatcgatgactcatgggcctccataaagagcatcttggactggaccagtcggaatcaggagcgaattgtggatgtcgcaggccctggaggatggaacgatccagacatgctggtgatcggcaattttggcctctcttgggaccagcaggttacccaaatggctctgtgggcaattatggccggtcctcttttcatgagcaacgatctgcgcgcgatctcaccacaggcaaaggccctgctccaagacaaagatgtgatagccatcaatcaggacccgttgggaaagcagggctaccagctgagaaaaggcgacaactttgaggtctgggaaaggcctttgagtggagatgcgtgggctgtggccattattaatcggcaagagatcggaggtccacgctcctatacaattcctgtagcatctcttggcaagggcgttgcctgtaacccagcttgcttcatcactcagcttctgccggtgaagagaaaactgggtttctacgaagctaccagcaggctccgatcccacatcaaccctacaggaaccgtcctcttgcagctggagaatacgatgcagacttcactgaaggacctcctg

SEQ ID NO: 1272 - protein, 398 aa, Artificial Sequence
  variant of human alpha-galactosidase A
LDNGLARTPPMGWLHWERFMCNLDCQEEPDSCISEKLFIEMAERMVTEGWKDAGYEYLCIDDCWMAPQRDSEGRLQADPQRFPHGIRQLANHVHSKGLKLGIYADVGNKTCAGFPGSFGYYDIDAQTFADWGVDLLKFDGCYCDSLENLADGYKHMSLALNRTGRPIVYSCEWPLYMWPFQKPNYTEIRQYCNHWRNFADIDDSWASIKSILDWTSRNQERIVDVAGPGGWNDPDMLVIGNFGLSWDQQVTQMALWAIMAGPLFMSNDLRAISPQAKALLQDKDVIAINQDPLGKQGYQLRKGDNFEVWERPLSGDAWAVAIINRQEIGGPRSYTIPVASLGKGVACNPACFITQLLPVKRKLGFYEATSRLRSHINPTGTVLLQLENTMQTSLKDLL

SEQ ID NO: 1273 - DNA, 1194 bp, Artificial Sequence
  variant of human alpha-galactosidase A
ctggataatggattggctagaacacctcctatggggtggcttcactgggagaggttcatgtgcaacctggactgtcaggaagaaccagacagctgcatctccgagaagctctttaaggaaatggccgaacgaatggtgactgagggctggaaagatgcaggttacgagtatctgtgtattgacgattgctggatggccccacaacgggattctgagggaagacttcaggctgatccgcagcgcttccctcatggcataaggcagctggcaaaccacgtccacagtaaggggctcaaattgggaatctacgcggacgtgggcaataagacctgtgccggttttccgggatcattcgggtattatgacattgacgcccaaacgtttgctgattggggcgttgacctgctgaaattcgatggttgctactgtgacagcctcgaaaacctggcagacggctacaagcatatgtctctcgccctgaatagaaccggtcggccaatcgtatattcctgcgagtggcctctttacatgtggccatttcagaaaccgaactacacagaaattcgccagtattgcaatcattggaggaacttcgctgatatcgatgactcatgggcctccataaagagcatcttggactggaccagtcggaatcaggagcgaattgtggatgtcgcaggccctggaggatggaacgatccagacatgctggtgatcggcaattttggcctctcttgggaccagcaggttacccaaatggctctgtgggcaattatggccggtcctcttttcatgagcaacgatctgcgcgcgatctcaccacaggcaaaggccctgctccaagacaaagatgtgatagccatcaatcaggacccgttgggaaagcagggctaccagctgagaaaaggcgacaactttgaggtctgggaaaggcctttgagtggagatgcgtgggctgtggccattattaatcggcaagagatcggaggtccacgctcctatacaattcctgtagcatctcttggcaagggcgttgcctgtaacccagcttgcttcatcactcagcttctgccggtgaagagaaaactgggtttctacgaagctaccagcaggctccgatcccacatcaaccctacaggaaccgtcctcttgcagctggagaatacgatgcagacttcactgaaggacctcctg

SEQ ID NO: 1274 - protein, 398 aa, Artificial Sequence
  variant of human alpha-galactosidase A
LDNGLARTPPMGWLHWERFMCNLDCQEEPDSCISEKLFKEMAERMVTEGWKDAGYEYLCIDDCWMAPQRDSEGRLQADPQRFPHGIRQLANHVHSKGLKLGIYADVGNKTCAGFPGSFGYYDIDAQTFADWGVDLLKFDGCYCDSLENLADGYKHMSLALNRTGRPIVYSCEWPLYMWPFQKPNYTEIRQYCNHWRNFADIDDSWASIKSILDWTSRNQERIVDVAGPGGWNDPDMLVIGNFGLSWDQQVTQMALWAIMAGPLFMSNDLRAISPQAKALLQDKDVIAINQDPLGKQGYQLRKGDNFEVWERPLSGDAWAVAIINRQEIGGPRSYTIPVASLGKGVACNPACFITQLLPVKRKLGFYEATSRLRSHINPTGTVLLQLENTMQTSLKDLL

SEQ ID NO: 1275 - DNA, 1194 bp, Artificial Sequence
  variant of human alpha-galactosidase A
ctggataatggattggctagaacacctcctatggggtggcttcactgggagaggttcatgtgcaacctggactgtcaggaagaaccagacagctgcatctccgagaagctctttctggaaatggccgaacgaatggtgactgagggctggaaagatgcaggttacgagtatctgtgtattgacgattgctggatggccccacaacgggattctgagggaagacttcaggctgatccgcagcgcttccctcatggcataaggcagctggcaaaccacgtccacagtaaggggctcaaattgggaatctacgcggacgtgggcaataagacctgtgccggttttccgggatcattcgggtattatgacattgacgcccaaacgtttgctgattggggcgttgacctgctgaaattcgatggttgctactgtgacagcctcgaaaacctggcagacggctacaagcatatgtctctcgccctgaatagaaccggtcggccaatcgtatattcctgcgagtggcctctttacatgtggccatttcagaaaccgaactacacagaaattcgccagtattgcaatcattggaggaacttcgctgatatcgatgactcatgggcctccataaagagcatcttggactggaccagtcggaatcaggagcgaattgtggatgtcgcaggccctggaggatggaacgatccagacatgctggtgatcggcaattttggcctctcttgggaccagcaggttacccaaatggctctgtgggcaattatggccggtcctcttttcatgagcaacgatctgcgcgcgatctcaccacaggcaaaggccctgctccaagacaaagatgtgatagccatcaatcaggacccgttgggaaagcagggctaccagctgagaaaaggcgacaactttgaggtctgggaaaggcctttgagtggagatgcgtgggctgtggccattattaatcggcaagagatcggaggtccacgctcctatacaattcctgtagcatctcttggcaagggcgttgcctgtaacccagcttgcttcatcactcagcttctgccggtgaagagaaaactgggtttctacgaagctaccagcaggctccgatcccacatcaaccctacaggaaccgtcctcttgcagctggagaatacgatgcagacttcactgaaggacctcctg

SEQ ID NO: 1276 - protein, 398 aa, Artificial Sequence
  variant of human alpha-galactosidase A
LDNGLARTPPMGWLHWERFMCNLDCQEEPDSCISEKLFLEMAERMVTEGWKDAGYEYLCIDDCWMAPQRDSEGRLQADPQRFPHGIRQLANHVHSKGLKLGIYADVGNKTCAGFPGSFGYYDIDAQTFADWGVDLLKFDGCYCDSLENLADGYKHMSLALNRTGRPIVYSCEWPLYMWPFQKPNYTEIRQYCNHWRNFADIDDSWASIKSILDWTSRNQERIVDVAGPGGWNDPDMLVIGNFGLSWDQQVTQMALWAIMAGPLFMSNDLRAISPQAKALLQDKDVIAINQDPLGKQGYQLRKGDNFEVWERPLSGDAWAVAIINRQEIGGPRSYTIPVASLGKGVACNPACFITQLLPVKRKLGFYEATSRLRSHINPTGTVLLQLENTMQTSLKDLL

SEQ ID NO: 1277 - DNA, 1194 bp, Artificial Sequence
  variant of human alpha-galactosidase A
ctggataatggattggctagaacacctcctatggggtggcttcactgggagaggttcatgtgcaacctggactgtcaggaagaaccagacagctgcatctccgagaagctctttatggaaatggccgaacgaatggtgactgagggctggaaagatgcaggttacgagtatctgtgtattgacgattgctggatggccccacaacgggattctgagggaagacttcaggctgatccgcagcgcttccctcatggcataaggcagctggcaaaccacgtccacagtaaggggctcaaattgggaatctacgcggacgtgggcaataagacctgtgccggttttccgggatcattcgggtattatgacattgacgcccaaacgtttgctgattggggcgttgacctgctgaaattcgatggttgctactgtgacagcctcgaaaacctggcagacggctacaagcatatgtctctcgccctgaatagaaccggtcggccaatcgtatattcctgcgagtggcctctttacatgtggccatttcagaaaccgaactacacagaaattcgccagtattgcaatcattggaggaacttcgctgatatcgatgactcatgggcctccataaagagcatcttggactggaccagtcggaatcaggagcgaattgtggatgtcgcaggccctggaggatggaacgatccagacatgctggtgatcggcaattttggcctctcttgggaccagcaggttacccaaatggctctgtgggcaattatggccggtcctcttttcatgagcaacgatctgcgcgcgatctcaccacaggcaaaggccctgctccaagacaaagatgtgatagccatcaatcaggacccgttgggaaagcagggctaccagctgagaaaaggcgacaactttgaggtctgggaaaggcctttgagtggagatgcgtgggctgtggccattattaatcggcaagagatcggaggtccacgctcctatacaattcctgtagcatctcttggcaagggcgttgcctgtaacccagcttgcttcatcactcagcttctgccggtgaagagaaaactgggtttctacgaagctaccagcaggctccgatcccacatcaaccctacaggaaccgtcctcttgcagctggagaatacgatgcagacttcactgaaggacctcctg

SEQ ID NO: 1278 - protein, 398 aa, Artificial Sequence
  variant of human alpha-galactosidase A
LDNGLARTPPMGWLHWERFMCNLDCQEEPDSCISEKLFMEMAERMVTEGWKDAGYEYLCIDDCWMAPQRDSEGRLQADPQRFPHGIRQLANHVHSKGLKLGIYADVGNKTCAGFPGSFGYYDIDAQTFADWGVDLLKFDGCYCDSLENLADGYKHMSLALNRTGRPIVYSCEWPLYMWPFQKPNYTEIRQYCNHWRNFADIDDSWASIKSILDWTSRNQERIVDVAGPGGWNDPDMLVIGNFGLSWDQQVTQMALWAIMAGPLFMSNDLRAISPQAKALLQDKDVIAINQDPLGKQGYQLRKGDNFEVWERPLSGDAWAVAIINRQEIGGPRSYTIPVASLGKGVACNPACFITQLLPVKRKLGFYEATSRLRSHINPTGTVLLQLENTMQTSLKDLL

SEQ ID NO: 1279 - DNA, 1194 bp, Artificial Sequence
  variant of human alpha-galactosidase A
ctggataatggattggctagaacacctcctatggggtggcttcactgggagaggttcatgtgcaacctggactgtcaggaagaaccagacagctgcatctccgagaagctctttaatgaaatggccgaacgaatggtgactgagggctggaaagatgcaggttacgagtatctgtgtattgacgattgctggatggccccacaacgggattctgagggaagacttcaggctgatccgcagcgcttccctcatggcataaggcagctggcaaaccacgtccacagtaaggggctcaaattgggaatctacgcggacgtgggcaataagacctgtgccggttttccgggatcattcgggtattatgacattgacgcccaaacgtttgctgattggggcgttgacctgctgaaattcgatggttgctactgtgacagcctcgaaaacctggcagacggctacaagcatatgtctctcgccctgaatagaaccggtcggccaatcgtatattcctgcgagtggcctctttacatgtggccatttcagaaaccgaactacacagaaattcgccagtattgcaatcattggaggaacttcgctgatatcgatgactcatgggcctccataaagagcatcttggactggaccagtcggaatcaggagcgaattgtggatgtcgcaggccctggaggatggaacgatccagacatgctggtgatcggcaattttggcctctcttgggaccagcaggttacccaaatggctctgtgggcaattatggccggtcctcttttcatgagcaacgatctgcgcgcgatctcaccacaggcaaaggccctgctccaagacaaagatgtgatagccatcaatcaggacccgttgggaaagcagggctaccagctgagaaaaggcgacaactttgaggtctgggaaaggcctttgagtggagatgcgtgggctgtggccattattaatcggcaagagatcggaggtccacgctcctatacaattcctgtagcatctcttggcaagggcgttgcctgtaacccagcttgcttcatcactcagcttctgccggtgaagagaaaactgggtttctacgaagctaccagcaggctccgatcccacatcaaccctacaggaaccgtcctcttgcagctggagaatacgatgcagacttcactgaaggacctcctg

SEQ ID NO: 1280 - protein, 398 aa, Artificial Sequence
  variant of human alpha-galactosidase A
LDNGLARTPPMGWLHWERFMCNLDCQEEPDSCISEKLFNEMAERMVTEGWKDAGYEYLCIDDCWMAPQRDSEGRLQADPQRFPHGIRQLANHVHSKGLKLGIYADVGNKTCAGFPGSFGYYDIDAQTFADWGVDLLKFDGCYCDSLENLADGYKHMSLALNRTGRPIVYSCEWPLYMWPFQKPNYTEIRQYCNHWRNFADIDDSWASIKSILDWTSRNQERIVDVAGPGGWNDPDMLVIGNFGLSWDQQVTQMALWAIMAGPLFMSNDLRAISPQAKALLQDKDVIAINQDPLGKQGYQLRKGDNFEVWERPLSGDAWAVAIINRQEIGGPRSYTIPVASLGKGVACNPACFITQLLPVKRKLGFYEATSRLRSHINPTGTVLLQLENTMQTSLKDLL

SEQ ID NO: 1281 - DNA, 1194 bp, Artificial Sequence
  variant of human alpha-galactosidase A
ctggataatggattggctagaacacctcctatggggtggcttcactgggagaggttcatgtgcaacctggactgtcaggaagaaccagacagctgcatctccgagaagctctttccggaaatggccgaacgaatggtgactgagggctggaaagatgcaggttacgagtatctgtgtattgacgattgctggatggccccacaacgggattctgagggaagacttcaggctgatccgcagcgcttccctcatggcataaggcagctggcaaaccacgtccacagtaaggggctcaaattgggaatctacgcggacgtgggcaataagacctgtgccggttttccgggatcattcgggtattatgacattgacgcccaaacgtttgctgattggggcgttgacctgctgaaattcgatggttgctactgtgacagcctcgaaaacctggcagacggctacaagcatatgtctctcgccctgaatagaaccggtcggccaatcgtatattcctgcgagtggcctctttacatgtggccatttcagaaaccgaactacacagaaattcgccagtattgcaatcattggaggaacttcgctgatatcgatgactcatgggcctccataaagagcatcttggactggaccagtcggaatcaggagcgaattgtggatgtcgcaggccctggaggatggaacgatccagacatgctggtgatcggcaattttggcctctcttgggaccagcaggttacccaaatggctctgtgggcaattatggccggtcctcttttcatgagcaacgatctgcgcgcgatctcaccacaggcaaaggccctgctccaagacaaagatgtgatagccatcaatcaggacccgttgggaaagcagggctaccagctgagaaaaggcgacaactttgaggtctgggaaaggcctttgagtggagatgcgtgggctgtggccattattaatcggcaagagatcggaggtccacgctcctatacaattcctgtagcatctcttggcaagggcgttgcctgtaacccagcttgcttcatcactcagcttctgccggtgaagagaaaactgggtttctacgaagctaccagcaggctccgatcccacatcaaccctacaggaaccgtcctcttgcagctggagaatacgatgcagacttcactgaaggacctcctg

SEQ ID NO: 1282 - protein, 398 aa, Artificial Sequence
  variant of human alpha-galactosidase A
LDNGLARTPPMGWLHWERFMCNLDCQEEPDSCISEKLFPEMAERMVTEGWKDAGYEYLCIDDCWMAPQRDSEGRLQADPQRFPHGIRQLANHVHSKGLKLGIYADVGNKTCAGFPGSFGYYDIDAQTFADWGVDLLKFDGCYCDSLENLADGYKHMSLALNRTGRPIVYSCEWPLYMWPFQKPNYTEIRQYCNHWRNFADIDDSWASIKSILDWTSRNQERIVDVAGPGGWNDPDMLVIGNFGLSWDQQVTQMALWAIMAGPLFMSNDLRAISPQAKALLQDKDVIAINQDPLGKQGYQLRKGDNFEVWERPLSGDAWAVAIINRQEIGGPRSYTIPVASLGKGVACNPACFITQLLPVKRKLGFYEATSRLRSHINPTGTVLLQLENTMQTSLKDLL

SEQ ID NO: 1283 - DNA, 1194 bp, Artificial Sequence
  variant of human alpha-galactosidase A
ctggataatggattggctagaacacctcctatggggtggcttcactgggagaggttcatgtgcaacctggactgtcaggaagaaccagacagctgcatctccgagaagctctttcaggaaatggccgaacgaatggtgactgagggctggaaagatgcaggttacgagtatctgtgtattgacgattgctggatggccccacaacgggattctgagggaagacttcaggctgatccgcagcgcttccctcatggcataaggcagctggcaaaccacgtccacagtaaggggctcaaattgggaatctacgcggacgtgggcaataagacctgtgccggttttccgggatcattcgggtattatgacattgacgcccaaacgtttgctgattggggcgttgacctgctgaaattcgatggttgctactgtgacagcctcgaaaacctggcagacggctacaagcatatgtctctcgccctgaatagaaccggtcggccaatcgtatattcctgcgagtggcctctttacatgtggccatttcagaaaccgaactacacagaaattcgccagtattgcaatcattggaggaacttcgctgatatcgatgactcatgggcctccataaagagcatcttggactggaccagtcggaatcaggagcgaattgtggatgtcgcaggccctggaggatggaacgatccagacatgctggtgatcggcaattttggcctctcttgggaccagcaggttacccaaatggctctgtgggcaattatggccggtcctcttttcatgagcaacgatctgcgcgcgatctcaccacaggcaaaggccctgctccaagacaaagatgtgatagccatcaatcaggacccgttgggaaagcagggctaccagctgagaaaaggcgacaactttgaggtctgggaaaggcctttgagtggagatgcgtgggctgtggccattattaatcggcaagagatcggaggtccacgctcctatacaattcctgtagcatctcttggcaagggcgttgcctgtaacccagcttgcttcatcactcagcttctgccggtgaagagaaaactgggtttctacgaagctaccagcaggctccgatcccacatcaaccctacaggaaccgtcctcttgcagctggagaatacgatgcagacttcactgaaggacctcctg

SEQ ID NO: 1284 - protein, 398 aa, Artificial Sequence
  variant of human alpha-galactosidase A
LDNGLARTPPMGWLHWERFMCNLDCQEEPDSCISEKLFQEMAERMVTEGWKDAGYEYLCIDDCWMAPQRDSEGRLQADPQRFPHGIRQLANHVHSKGLKLGIYADVGNKTCAGFPGSFGYYDIDAQTFADWGVDLLKFDGCYCDSLENLADGYKHMSLALNRTGRPIVYSCEWPLYMWPFQKPNYTEIRQYCNHWRNFADIDDSWASIKSILDWTSRNQERIVDVAGPGGWNDPDMLVIGNFGLSWDQQVTQMALWAIMAGPLFMSNDLRAISPQAKALLQDKDVIAINQDPLGKQGYQLRKGDNFEVWERPLSGDAWAVAIINRQEIGGPRSYTIPVASLGKGVACNPACFITQLLPVKRKLGFYEATSRLRSHINPTGTVLLQLENTMQTSLKDLL

SEQ ID NO: 1285 - DNA, 1194 bp, Artificial Sequence
  variant of human alpha-galactosidase A
ctggataatggattggctagaacacctcctatggggtggcttcactgggagaggttcatgtgcaacctggactgtcaggaagaaccagacagctgcatctccgagaagctctttagggaaatggccgaacgaatggtgactgagggctggaaagatgcaggttacgagtatctgtgtattgacgattgctggatggccccacaacgggattctgagggaagacttcaggctgatccgcagcgcttccctcatggcataaggcagctggcaaaccacgtccacagtaaggggctcaaattgggaatctacgcggacgtgggcaataagacctgtgccggttttccgggatcattcgggtattatgacattgacgcccaaacgtttgctgattggggcgttgacctgctgaaattcgatggttgctactgtgacagcctcgaaaacctggcagacggctacaagcatatgtctctcgccctgaatagaaccggtcggccaatcgtatattcctgcgagtggcctctttacatgtggccatttcagaaaccgaactacacagaaattcgccagtattgcaatcattggaggaacttcgctgatatcgatgactcatgggcctccataaagagcatcttggactggaccagtcggaatcaggagcgaattgtggatgtcgcaggccctggaggatggaacgatccagacatgctggtgatcggcaattttggcctctcttgggaccagcaggttacccaaatggctctgtgggcaattatggccggtcctcttttcatgagcaacgatctgcgcgcgatctcaccacaggcaaaggccctgctccaagacaaagatgtgatagccatcaatcaggacccgttgggaaagcagggctaccagctgagaaaaggcgacaactttgaggtctgggaaaggcctttgagtggagatgcgtgggctgtggccattattaatcggcaagagatcggaggtccacgctcctatacaattcctgtagcatctcttggcaagggcgttgcctgtaacccagcttgcttcatcactcagcttctgccggtgaagagaaaactgggtttctacgaagctaccagcaggctccgatcccacatcaaccctacaggaaccgtcctcttgcagctggagaatacgatgcagacttcactgaaggacctcctg

SEQ ID NO: 1286 - protein, 398 aa, Artificial Sequence
  variant of human alpha-galactosidase A
LDNGLARTPPMGWLHWERFMCNLDCQEEPDSCISEKLFREMAERMVTEGWKDAGYEYLCIDDCWMAPQRDSEGRLQADPQRFPHGIRQLANHVHSKGLKLGIYADVGNKTCAGFPGSFGYYDIDAQTFADWGVDLLKFDGCYCDSLENLADGYKHMSLALNRTGRPIVYSCEWPLYMWPFQKPNYTEIRQYCNHWRNFADIDDSWASIKSILDWTSRNQERIVDVAGPGGWNDPDMLVIGNFGLSWDQQVTQMALWAIMAGPLFMSNDLRAISPQAKALLQDKDVIAINQDPLGKQGYQLRKGDNFEVWERPLSGDAWAVAIINRQEIGGPRSYTIPVASLGKGVACNPACFITQLLPVKRKLGFYEATSRLRSHINPTGTVLLQLENTMQTSLKDLL

SEQ ID NO: 1287 - DNA, 1194 bp, Artificial Sequence
  variant of human alpha-galactosidase A
ctggataatggattggctagaacacctcctatggggtggcttcactgggagaggttcatgtgcaacctggactgtcaggaagaaccagacagctgcatctccgagaagctctttagcgaaatggccgaacgaatggtgactgagggctggaaagatgcaggttacgagtatctgtgtattgacgattgctggatggccccacaacgggattctgagggaagacttcaggctgatccgcagcgcttccctcatggcataaggcagctggcaaaccacgtccacagtaaggggctcaaattgggaatctacgcggacgtgggcaataagacctgtgccggttttccgggatcattcgggtattatgacattgacgcccaaacgtttgctgattggggcgttgacctgctgaaattcgatggttgctactgtgacagcctcgaaaacctggcagacggctacaagcatatgtctctcgccctgaatagaaccggtcggccaatcgtatattcctgcgagtggcctctttacatgtggccatttcagaaaccgaactacacagaaattcgccagtattgcaatcattggaggaacttcgctgatatcgatgactcatgggcctccataaagagcatcttggactggaccagtcggaatcaggagcgaattgtggatgtcgcaggccctggaggatggaacgatccagacatgctggtgatcggcaattttggcctctcttgggaccagcaggttacccaaatggctctgtgggcaattatggccggtcctcttttcatgagcaacgatctgcgcgcgatctcaccacaggcaaaggccctgctccaagacaaagatgtgatagccatcaatcaggacccgttgggaaagcagggctaccagctgagaaaaggcgacaactttgaggtctgggaaaggcctttgagtggagatgcgtgggctgtggccattattaatcggcaagagatcggaggtccacgctcctatacaattcctgtagcatctcttggcaagggcgttgcctgtaacccagcttgcttcatcactcagcttctgccggtgaagagaaaactgggtttctacgaagctaccagcaggctccgatcccacatcaaccctacaggaaccgtcctcttgcagctggagaatacgatgcagacttcactgaaggacctcctg

SEQ ID NO: 1288 - protein, 398 aa, Artificial Sequence
  variant of human alpha-galactosidase A
LDNGLARTPPMGWLHWERFMCNLDCQEEPDSCISEKLFSEMAERMVTEGWKDAGYEYLCIDDCWMAPQRDSEGRLQADPQRFPHGIRQLANHVHSKGLKLGIYADVGNKTCAGFPGSFGYYDIDAQTFADWGVDLLKFDGCYCDSLENLADGYKHMSLALNRTGRPIVYSCEWPLYMWPFQKPNYTEIRQYCNHWRNFADIDDSWASIKSILDWTSRNQERIVDVAGPGGWNDPDMLVIGNFGLSWDQQVTQMALWAIMAGPLFMSNDLRAISPQAKALLQDKDVIAINQDPLGKQGYQLRKGDNFEVWERPLSGDAWAVAIINRQEIGGPRSYTIPVASLGKGVACNPACFITQLLPVKRKLGFYEATSRLRSHINPTGTVLLQLENTMQTSLKDLL

SEQ ID NO: 1289 - DNA, 1194 bp, Artificial Sequence
  variant of human alpha-galactosidase A
ctggataatggattggctagaacacctcctatggggtggcttcactgggagaggttcatgtgcaacctggactgtcaggaagaaccagacagctgcatctccgagaagctctttacggaaatggccgaacgaatggtgactgagggctggaaagatgcaggttacgagtatctgtgtattgacgattgctggatggccccacaacgggattctgagggaagacttcaggctgatccgcagcgcttccctcatggcataaggcagctggcaaaccacgtccacagtaaggggctcaaattgggaatctacgcggacgtgggcaataagacctgtgccggttttccgggatcattcgggtattatgacattgacgcccaaacgtttgctgattggggcgttgacctgctgaaattcgatggttgctactgtgacagcctcgaaaacctggcagacggctacaagcatatgtctctcgccctgaatagaaccggtcggccaatcgtatattcctgcgagtggcctctttacatgtggccatttcagaaaccgaactacacagaaattcgccagtattgcaatcattggaggaacttcgctgatatcgatgactcatgggcctccataaagagcatcttggactggaccagtcggaatcaggagcgaattgtggatgtcgcaggccctggaggatggaacgatccagacatgctggtgatcggcaattttggcctctcttgggaccagcaggttacccaaatggctctgtgggcaattatggccggtcctcttttcatgagcaacgatctgcgcgcgatctcaccacaggcaaaggccctgctccaagacaaagatgtgatagccatcaatcaggacccgttgggaaagcagggctaccagctgagaaaaggcgacaactttgaggtctgggaaaggcctttgagtggagatgcgtgggctgtggccattattaatcggcaagagatcggaggtccacgctcctatacaattcctgtagcatctcttggcaagggcgttgcctgtaacccagcttgcttcatcactcagcttctgccggtgaagagaaaactgggtttctacgaagctaccagcaggctccgatcccacatcaaccctacaggaaccgtcctcttgcagctggagaatacgatgcagacttcactgaaggacctcctg

SEQ ID NO: 1290 - protein, 398 aa, Artificial Sequence
  variant of human alpha-galactosidase A
LDNGLARTPPMGWLHWERFMCNLDCQEEPDSCISEKLFTEMAERMVTEGWKDAGYEYLCIDDCWMAPQRDSEGRLQADPQRFPHGIRQLANHVHSKGLKLGIYADVGNKTCAGFPGSFGYYDIDAQTFADWGVDLLKFDGCYCDSLENLADGYKHMSLALNRTGRPIVYSCEWPLYMWPFQKPNYTEIRQYCNHWRNFADIDDSWASIKSILDWTSRNQERIVDVAGPGGWNDPDMLVIGNFGLSWDQQVTQMALWAIMAGPLFMSNDLRAISPQAKALLQDKDVIAINQDPLGKQGYQLRKGDNFEVWERPLSGDAWAVAIINRQEIGGPRSYTIPVASLGKGVACNPACFITQLLPVKRKLGFYEATSRLRSHINPTGTVLLQLENTMQTSLKDLL

SEQ ID NO: 1291 - DNA, 1194 bp, Artificial Sequence
  variant of human alpha-galactosidase A
ctggataatggattggctagaacacctcctatggggtggcttcactgggagaggttcatgtgcaacctggactgtcaggaagaaccagacagctgcatctccgagaagctctttgtggaaatggccgaacgaatggtgactgagggctggaaagatgcaggttacgagtatctgtgtattgacgattgctggatggccccacaacgggattctgagggaagacttcaggctgatccgcagcgcttccctcatggcataaggcagctggcaaaccacgtccacagtaaggggctcaaattgggaatctacgcggacgtgggcaataagacctgtgccggttttccgggatcattcgggtattatgacattgacgcccaaacgtttgctgattggggcgttgacctgctgaaattcgatggttgctactgtgacagcctcgaaaacctggcagacggctacaagcatatgtctctcgccctgaatagaaccggtcggccaatcgtatattcctgcgagtggcctctttacatgtggccatttcagaaaccgaactacacagaaattcgccagtattgcaatcattggaggaacttcgctgatatcgatgactcatgggcctccataaagagcatcttggactggaccagtcggaatcaggagcgaattgtggatgtcgcaggccctggaggatggaacgatccagacatgctggtgatcggcaattttggcctctcttgggaccagcaggttacccaaatggctctgtgggcaattatggccggtcctcttttcatgagcaacgatctgcgcgcgatctcaccacaggcaaaggccctgctccaagacaaagatgtgatagccatcaatcaggacccgttgggaaagcagggctaccagctgagaaaaggcgacaactttgaggtctgggaaaggcctttgagtggagatgcgtgggctgtggccattattaatcggcaagagatcggaggtccacgctcctatacaattcctgtagcatctcttggcaagggcgttgcctgtaacccagcttgcttcatcactcagcttctgccggtgaagagaaaactgggtttctacgaagctaccagcaggctccgatcccacatcaaccctacaggaaccgtcctcttgcagctggagaatacgatgcagacttcactgaaggacctcctg

SEQ ID NO: 1292 - protein, 398 aa, Artificial Sequence; identical to SEQ ID NO: 258
  variant of human alpha-galactosidase A

SEQ ID NO: 1293 - DNA, 1194 bp, Artificial Sequence
  variant of human alpha-galactosidase A
ctggataatggattggctagaacacctcctatggggtggcttcactgggagaggttcatgtgcaacctggactgtcaggaagaaccagacagctgcatctccgagaagctcttttgggaaatggccgaacgaatggtgactgagggctggaaagatgcaggttacgagtatctgtgtattgacgattgctggatggccccacaacgggattctgagggaagacttcaggctgatccgcagcgcttccctcatggcataaggcagctggcaaaccacgtccacagtaaggggctcaaattgggaatctacgcggacgtgggcaataagacctgtgccggttttccgggatcattcgggtattatgacattgacgcccaaacgtttgctgattggggcgttgacctgctgaaattcgatggttgctactgtgacagcctcgaaaacctggcagacggctacaagcatatgtctctcgccctgaatagaaccggtcggccaatcgtatattcctgcgagtggcctctttacatgtggccatttcagaaaccgaactacacagaaattcgccagtattgcaatcattggaggaacttcgctgatatcgatgactcatgggcctccataaagagcatcttggactggaccagtcggaatcaggagcgaattgtggatgtcgcaggccctggaggatggaacgatccagacatgctggtgatcggcaattttggcctctcttgggaccagcaggttacccaaatggctctgtgggcaattatggccggtcctcttttcatgagcaacgatctgcgcgcgatctcaccacaggcaaaggccctgctccaagacaaagatgtgatagccatcaatcaggacccgttgggaaagcagggctaccagctgagaaaaggcgacaactttgaggtctgggaaaggcctttgagtggagatgcgtgggctgtggccattattaatcggcaagagatcggaggtccacgctcctatacaattcctgtagcatctcttggcaagggcgttgcctgtaacccagcttgcttcatcactcagcttctgccggtgaagagaaaactgggtttctacgaagctaccagcaggctccgatcccacatcaaccctacaggaaccgtcctcttgcagctggagaatacgatgcagacttcactgaaggacctcctg

SEQ ID NO: 1294 - protein, 398 aa, Artificial Sequence
  variant of human alpha-galactosidase A
LDNGLARTPPMGWLHWERFMCNLDCQEEPDSCISEKLFWEMAERMVTEGWKDAGYEYLCIDDCWMAPQRDSEGRLQADPQRFPHGIRQLANHVHSKGLKLGIYADVGNKTCAGFPGSFGYYDIDAQTFADWGVDLLKFDGCYCDSLENLADGYKHMSLALNRTGRPIVYSCEWPLYMWPFQKPNYTEIRQYCNHWRNFADIDDSWASIKSILDWTSRNQERIVDVAGPGGWNDPDMLVIGNFGLSWDQQVTQMALWAIMAGPLFMSNDLRAISPQAKALLQDKDVIAINQDPLGKQGYQLRKGDNFEVWERPLSGDAWAVAIINRQEIGGPRSYTIPVASLGKGVACNPACFITQLLPVKRKLGFYEATSRLRSHINPTGTVLLQLENTMQTSLKDLL

SEQ ID NO: 1295 - DNA, 1194 bp, Artificial Sequence
  variant of human alpha-galactosidase A
ctggataatggattggctagaacacctcctatggggtggcttcactgggagaggttcatgtgcaacctggactgtcaggaagaaccagacagctgcatctccgagaagctcttttatgaaatggccgaacgaatggtgactgagggctggaaagatgcaggttacgagtatctgtgtattgacgattgctggatggccccacaacgggattctgagggaagacttcaggctgatccgcagcgcttccctcatggcataaggcagctggcaaaccacgtccacagtaaggggctcaaattgggaatctacgcggacgtgggcaataagacctgtgccggttttccgggatcattcgggtattatgacattgacgcccaaacgtttgctgattggggcgttgacctgctgaaattcgatggttgctactgtgacagcctcgaaaacctggcagacggctacaagcatatgtctctcgccctgaatagaaccggtcggccaatcgtatattcctgcgagtggcctctttacatgtggccatttcagaaaccgaactacacagaaattcgccagtattgcaatcattggaggaacttcgctgatatcgatgactcatgggcctccataaagagcatcttggactggaccagtcggaatcaggagcgaattgtggatgtcgcaggccctggaggatggaacgatccagacatgctggtgatcggcaattttggcctctcttgggaccagcaggttacccaaatggctctgtgggcaattatggccggtcctcttttcatgagcaacgatctgcgcgcgatctcaccacaggcaaaggccctgctccaagacaaagatgtgatagccatcaatcaggacccgttgggaaagcagggctaccagctgagaaaaggcgacaactttgaggtctgggaaaggcctttgagtggagatgcgtgggctgtggccattattaatcggcaagagatcggaggtccacgctcctatacaattcctgtagcatctcttggcaagggcgttgcctgtaacccagcttgcttcatcactcagcttctgccggtgaagagaaaactgggtttctacgaagctaccagcaggctccgatcccacatcaaccctacaggaaccgtcctcttgcagctggagaatacgatgcagacttcactgaaggacctcctg

SEQ ID NO: 1296 - protein, 398 aa, Artificial Sequence
  variant of human alpha-galactosidase A
LDNGLARTPPMGWLHWERFMCNLDCQEEPDSCISEKLFYEMAERMVTEGWKDAGYEYLCIDDCWMAPQRDSEGRLQADPQRFPHGIRQLANHVHSKGLKLGIYADVGNKTCAGFPGSFGYYDIDAQTFADWGVDLLKFDGCYCDSLENLADGYKHMSLALNRTGRPIVYSCEWPLYMWPFQKPNYTEIRQYCNHWRNFADIDDSWASIKSILDWTSRNQERIVDVAGPGGWNDPDMLVIGNFGLSWDQQVTQMALWAIMAGPLFMSNDLRAISPQAKALLQDKDVIAINQDPLGKQGYQLRKGDNFEVWERPLSGDAWAVAIINRQEIGGPRSYTIPVASLGKGVACNPACFITQLLPVKRKLGFYEATSRLRSHINPTGTVLLQLENTMQTSLKDLL

SEQ ID NO: 1297 - DNA, 1194 bp, Artificial Sequence
  variant of human alpha-galactosidase A
ctggataatggattggctagaacacctcctatggggtggcttcactgggagaggttcatgtgcaacctggactgtcaggaagaaccagacagctgcatctccgagaagctctttgaggaaatggccgaacgaatggtgactgagggctggaaagatgcaggttacgagtatctgtgtattgacgattgctggatggccccacaacgggattctgagggaagacttcaggctgatccgcagcgcttccctcatggcataaggcagctggcaaaccacgtccacagtaaggggctcaaattgggaatctacgcggacgtgggcaataagacctgtgccggttttccgggatcattcgggtattatgacattgacgcccaaacgtttgctgattggggcgttgacctgctgaaattcgatggttgctactgtgacagcctcgaaaacctggcagacggctacaagcatatgtctctcgccctgaatagaaccggtcggccaatcgtatattcctgcgagtggcctctttacatgtggccatttcagaaaccgaactacacagaaattcgccagtattgcaatcattggaggaacttcgctgatatcgatgactcatgggcctccataaagagcatcttggactggaccagtcggaatcaggagcgaattgtggatgtcgcaggccctggaggatggaacgatccagacatgctggtgatcggcaattttggcctctcttgggaccagcaggttacccaaatggctctgtgggcaattatggccgcgcctcttttcatgagcaacgatctgcgcgcgatctcaccacaggcaaaggccctgctccaagacaaagatgtgatagccatcaatcaggacccgttgggaaagcagggctaccagctgagaaaaggcgacaactttgaggtctgggaaaggcctttgagtggagatgcgtgggctgtggccattattaatcggcaagagatcggaggtccacgctcctatacaattcctgtagcatctcttggcaagggcgttgcctgtaacccagcttgcttcatcactcagcttctgccggtgaagagaaaactgggtttctacgaagctaccagcaggctccgatcccacatcaaccctacaggaaccgtcctcttgcagctggagaatacgatgcagacttcactgaaggacctcctg

SEQ ID NO: 1298 - protein, 398 aa, Artificial Sequence
  variant of human alpha-galactosidase A
LDNGLARTPPMGWLHWERFMCNLDCQEEPDSCISEKLFEEMAERMVTEGWKDAGYEYLCIDDCWMAPQRDSEGRLQADPQRFPHGIRQLANHVHSKGLKLGIYADVGNKTCAGFPGSFGYYDIDAQTFADWGVDLLKFDGCYCDSLENLADGYKHMSLALNRTGRPIVYSCEWPLYMWPFQKPNYTEIRQYCNHWRNFADIDDSWASIKSILDWTSRNQERIVDVAGPGGWNDPDMLVIGNFGLSWDQQVTQMALWAIMAAPLFMSNDLRAISPQAKALLQDKDVIAINQDPLGKQGYQLRKGDNFEVWERPLSGDAWAVAIINRQEIGGPRSYTIPVASLGKGVACNPACFITQLLPVKRKLGFYEATSRLRSHINPTGTVLLQLENTMQTSLKDLL

SEQ ID NO: 1299 - DNA, 1194 bp, Artificial Sequence
  variant of human alpha-galactosidase A
ctggataatggattggctagaacacctcctatggggtggcttcactgggagaggttcatgtgcaacctggactgtcaggaagaaccagacagctgcatctccgagaagctctttgaggaaatggccgaacgaatggtgactgagggctggaaagatgcaggttacgagtatctgtgtattgacgattgctggatggccccacaacgggattctgagggaagacttcaggctgatccgcagcgcttccctcatggcataaggcagctggcaaaccacgtccacagtaaggggctcaaattgggaatctacgcggacgtgggcaataagacctgtgccggttttccgggatcattcgggtattatgacattgacgcccaaacgtttgctgattggggcgttgacctgctgaaattcgatggttgctactgtgacagcctcgaaaacctggcagacggctacaagcatatgtctctcgccctgaatagaaccggtcggccaatcgtatattcctgcgagtggcctctttacatgtggccatttcagaaaccgaactacacagaaattcgccagtattgcaatcattggaggaacttcgctgatatcgatgactcatgggcctccataaagagcatcttggactggaccagtcggaatcaggagcgaattgtggatgtcgcaggccctggaggatggaacgatccagacatgctggtgatcggcaattttggcctctcttgggaccagcaggttacccaaatggctctgtgggcaattatggcctgtcctcttttcatgagcaacgatctgcgcgcgatctcaccacaggcaaaggccctgctccaagacaaagatgtgatagccatcaatcaggacccgttgggaaagcagggctaccagctgagaaaaggcgacaactttgaggtctgggaaaggcctttgagtggagatgcgtgggctgtggccattattaatcggcaagagatcggaggtccacgctcctatacaattcctgtagcatctcttggcaagggcgttgcctgtaacccagcttgcttcatcactcagcttctgccggtgaagagaaaactgggtttctacgaagctaccagcaggctccgatcccacatcaaccctacaggaaccgtcctcttgcagctggagaatacgatgcagacttcactgaaggacctcctg

SEQ ID NO: 1300 - protein, 398 aa, Artificial Sequence
  variant of human alpha-galactosidase A
LDNGLARTPPMGWLHWERFMCNLDCQEEPDSCISEKLFEEMAERMVTEGWKDAGYEYLCIDDCWMAPQRDSEGRLQADPQRFPHGIRQLANHVHSKGLKLGIYADVGNKTCAGFPGSFGYYDIDAQTFADWGVDLLKFDGCYCDSLENLADGYKHMSLALNRTGRPIVYSCEWPLYMWPFQKPNYTEIRQYCNHWRNFADIDDSWASIKSILDWTSRNQERIVDVAGPGGWNDPDMLVIGNFGLSWDQQVTQMALWAIMACPLFMSNDLRAISPQAKALLQDKDVIAINQDPLGKQGYQLRKGDNFEVWERPLSGDAWAVAIINRQEIGGPRSYTIPVASLGKGVACNPACFITQLLPVKRKLGFYEATSRLRSHINPTGTVLLQLENTMQTSLKDLL

SEQ ID NO: 1301 - DNA, 1194 bp, Artificial Sequence
  variant of human alpha-galactosidase A
ctggataatggattggctagaacacctcctatggggtggcttcactgggagaggttcatgtgcaacctggactgtcaggaagaaccagacagctgcatctccgagaagctctttgaggaaatggccgaacgaatggtgactgagggctggaaagatgcaggttacgagtatctgtgtattgacgattgctggatggccccacaacgggattctgagggaagacttcaggctgatccgcagcgcttccctcatggcataaggcagctggcaaaccacgtccacagtaaggggctcaaattgggaatctacgcggacgtgggcaataagacctgtgccggttttccgggatcattcgggtattatgacattgacgcccaaacgtttgctgattggggcgttgacctgctgaaattcgatggttgctactgtgacagcctcgaaaacctggcagacggctacaagcatatgtctctcgccctgaatagaaccggtcggccaatcgtatattcctgcgagtggcctctttacatgtggccatttcagaaaccgaactacacagaaattcgccagtattgcaatcattggaggaacttcgctgatatcgatgactcatgggcctccataaagagcatcttggactggaccagtcggaatcaggagcgaattgtggatgtcgcaggccctggaggatggaacgatccagacatgctggtgatcggcaattttggcctctcttgggaccagcaggttacccaaatggctctgtgggcaattatggccgatcctcttttcatgagcaacgatctgcgcgcgatctcaccacaggcaaaggccctgctccaagacaaagatgtgatagccatcaatcaggacccgttgggaaagcagggctaccagctgagaaaaggcgacaactttgaggtctgggaaaggcctttgagtggagatgcgtgggctgtggccattattaatcggcaagagatcggaggtccacgctcctatacaattcctgtagcatctcttggcaagggcgttgcctgtaacccagcttgcttcatcactcagcttctgccggtgaagagaaaactgggtttctacgaagctaccagcaggctccgatcccacatcaaccctacaggaaccgtcctcttgcagctggagaatacgatgcagacttcactgaaggacctcctg

SEQ ID NO: 1302 - protein, 398 aa, Artificial Sequence
  variant of human alpha-galactosidase A
LDNGLARTPPMGWLHWERFMCNLDCQEEPDSCISEKLFEEMAERMVTEGWKDAGYEYLCIDDCWMAPQRDSEGRLQADPQRFPHGIRQLANHVHSKGLKLGIYADVGNKTCAGFPGSFGYYDIDAQTFADWGVDLLKFDGCYCDSLENLADGYKHMSLALNRTGRPIVYSCEWPLYMWPFQKPNYTEIRQYCNHWRNFADIDDSWASIKSILDWTSRNQERIVDVAGPGGWNDPDMLVIGNFGLSWDQQVTQMALWAIMADPLFMSNDLRAISPQAKALLQDKDVIAINQDPLGKQGYQLRKGDNFEVWERPLSGDAWAVAIINRQEIGGPRSYTIPVASLGKGVACNPACFITQLLPVKRKLGFYEATSRLRSHINPTGTVLLQLENTMQTSLKDLL

SEQ ID NO: 1303 - DNA, 1194 bp, Artificial Sequence
  variant of human alpha-galactosidase A
ctggataatggattggctagaacacctcctatggggtggcttcactgggagaggttcatgtgcaacctggactgtcaggaagaaccagacagctgcatctccgagaagctctttgaggaaatggccgaacgaatggtgactgagggctggaaagatgcaggttacgagtatctgtgtattgacgattgctggatggccccacaacgggattctgagggaagacttcaggctgatccgcagcgcttccctcatggcataaggcagctggcaaaccacgtccacagtaaggggctcaaattgggaatctacgcggacgtgggcaataagacctgtgccggttttccgggatcattcgggtattatgacattgacgcccaaacgtttgctgattggggcgttgacctgctgaaattcgatggttgctactgtgacagcctcgaaaacctggcagacggctacaagcatatgtctctcgccctgaatagaaccggtcggccaatcgtatattcctgcgagtggcctctttacatgtggccatttcagaaaccgaactacacagaaattcgccagtattgcaatcattggaggaacttcgctgatatcgatgactcatgggcctccataaagagcatcttggactggaccagtcggaatcaggagcgaattgtggatgtcgcaggccctggaggatggaacgatccagacatgctggtgatcggcaattttggcctctcttgggaccagcaggttacccaaatggctctgtgggcaattatggccgagcctcttttcatgagcaacgatctgcgcgcgatctcaccacaggcaaaggccctgctccaagacaaagatgtgatagccatcaatcaggacccgttgggaaagcagggctaccagctgagaaaaggcgacaactttgaggtctgggaaaggcctttgagtggagatgcgtgggctgtggccattattaatcggcaagagatcggaggtccacgctcctatacaattcctgtagcatctcttggcaagggcgttgcctgtaacccagcttgcttcatcactcagcttctgccggtgaagagaaaactgggtttctacgaagctaccagcaggctccgatcccacatcaaccctacaggaaccgtcctcttgcagctggagaatacgatgcagacttcactgaaggacctcctg

SEQ ID NO: 1304 - protein, 398 aa, Artificial Sequence
  variant of human alpha-galactosidase A
LDNGLARTPPMGWLHWERFMCNLDCQEEPDSCISEKLFEEMAERMVTEGWKDAGYEYLCIDDCWMAPQRDSEGRLQADPQRFPHGIRQLANHVHSKGLKLGIYADVGNKTCAGFPGSFGYYDIDAQTFADWGVDLLKFDGCYCDSLENLADGYKHMSLALNRTGRPIVYSCEWPLYMWPFQKPNYTEIRQYCNHWRNFADIDDSWASIKSILDWTSRNQERIVDVAGPGGWNDPDMLVIGNFGLSWDQQVTQMALWAIMAEPLFMSNDLRAISPQAKALLQDKDVIAINQDPLGKQGYQLRKGDNFEVWERPLSGDAWAVAIINRQEIGGPRSYTIPVASLGKGVACNPACFITQLLPVKRKLGFYEATSRLRSHINPTGTVLLQLENTMQTSLKDLL

SEQ ID NO: 1305 - DNA, 1194 bp, Artificial Sequence
  variant of human alpha-galactosidase A
ctggataatggattggctagaacacctcctatggggtggcttcactgggagaggttcatgtgcaacctggactgtcaggaagaaccagacagctgcatctccgagaagctctttgaggaaatggccgaacgaatggtgactgagggctggaaagatgcaggttacgagtatctgtgtattgacgattgctggatggccccacaacgggattctgagggaagacttcaggctgatccgcagcgcttccctcatggcataaggcagctggcaaaccacgtccacagtaaggggctcaaattgggaatctacgcggacgtgggcaataagacctgtgccggttttccgggatcattcgggtattatgacattgacgcccaaacgtttgctgattggggcgttgacctgctgaaattcgatggttgctactgtgacagcctcgaaaacctggcagacggctacaagcatatgtctctcgccctgaatagaaccggtcggccaatcgtatattcctgcgagtggcctctttacatgtggccatttcagaaaccgaactacacagaaattcgccagtattgcaatcattggaggaacttcgctgatatcgatgactcatgggcctccataaagagcatcttggactggaccagtcggaatcaggagcgaattgtggatgtcgcaggccctggaggatggaacgatccagacatgctggtgatcggcaattttggcctctcttgggaccagcaggttacccaaatggctctgtgggcaattatggcctttcctcttttcatgagcaacgatctgcgcgcgatctcaccacaggcaaaggccctgctccaagacaaagatgtgatagccatcaatcaggacccgttgggaaagcagggctaccagctgagaaaaggcgacaactttgaggtctgggaaaggcctttgagtggagatgcgtgggctgtggccattattaatcggcaagagatcggaggtccacgctcctatacaattcctgtagcatctcttggcaagggcgttgcctgtaacccagcttgcttcatcactcagcttctgccggtgaagagaaaactgggtttctacgaagctaccagcaggctccgatcccacatcaaccctacaggaaccgtcctcttgcagctggagaatacgatgcagacttcactgaaggacctcctg

SEQ ID NO: 1306 - protein, 398 aa, Artificial Sequence
  variant of human alpha-galactosidase A
LDNGLARTPPMGWLHWERFMCNLDCQEEPDSCISEKLFEEMAERMVTEGWKDAGYEYLCIDDCWMAPQRDSEGRLQADPQRFPHGIRQLANHVHSKGLKLGIYADVGNKTCAGFPGSFGYYDIDAQTFADWGVDLLKFDGCYCDSLENLADGYKHMSLALNRTGRPIVYSCEWPLYMWPFQKPNYTEIRQYCNHWRNFADIDDSWASIKSILDWTSRNQERIVDVAGPGGWNDPDMLVIGNFGLSWDQQVTQMALWAIMAFPLFMSNDLRAISPQAKALLQDKDVIAINQDPLGKQGYQLRKGDNFEVWERPLSGDAWAVAIINRQEIGGPRSYTIPVASLGKGVACNPACFITQLLPVKRKLGFYEATSRLRSHINPTGTVLLQLENTMQTSLKDLL

SEQ ID NO: 1307 - DNA, 1194 bp, Artificial Sequence
  variant of human alpha-galactosidase A
ctggataatggattggctagaacacctcctatggggtggcttcactgggagaggttcatgtgcaacctggactgtcaggaagaaccagacagctgcatctccgagaagctctttgaggaaatggccgaacgaatggtgactgagggctggaaagatgcaggttacgagtatctgtgtattgacgattgctggatggccccacaacgggattctgagggaagacttcaggctgatccgcagcgcttccctcatggcataaggcagctggcaaaccacgtccacagtaaggggctcaaattgggaatctacgcggacgtgggcaataagacctgtgccggttttccgggatcattcgggtattatgacattgacgcccaaacgtttgctgattggggcgttgacctgctgaaattcgatggttgctactgtgacagcctcgaaaacctggcagacggctacaagcatatgtctctcgccctgaatagaaccggtcggccaatcgtatattcctgcgagtggcctctttacatgtggccatttcagaaaccgaactacacagaaattcgccagtattgcaatcattggaggaacttcgctgatatcgatgactcatgggcctccataaagagcatcttggactggaccagtcggaatcaggagcgaattgtggatgtcgcaggccctggaggatggaacgatccagacatgctggtgatcggcaattttggcctctcttgggaccagcaggttacccaaatggctctgtgggcaattatggcccaccctcttttcatgagcaacgatctgcgcgcgatctcaccacaggcaaaggccctgctccaagacaaagatgtgatagccatcaatcaggacccgttgggaaagcagggctaccagctgagaaaaggcgacaactttgaggtctgggaaaggcctttgagtggagatgcgtgggctgtggccattattaatcggcaagagatcggaggtccacgctcctatacaattcctgtagcatctcttggcaagggcgttgcctgtaacccagcttgcttcatcactcagcttctgccggtgaagagaaaactgggtttctacgaagctaccagcaggctccgatcccacatcaaccctacaggaaccgtcctcttgcagctggagaatacgatgcagacttcactgaaggacctcctg

SEQ ID NO: 1308 - protein, 398 aa, Artificial Sequence
  variant of human alpha-galactosidase A
LDNGLARTPPMGWLHWERFMCNLDCQEEPDSCISEKLFEEMAERMVTEGWKDAGYEYLCIDDCWMAPQRDSEGRLQADPQRFPHGIRQLANHVHSKGLKLGIYADVGNKTCAGFPGSFGYYDIDAQTFADWGVDLLKFDGCYCDSLENLADGYKHMSLALNRTGRPIVYSCEWPLYMWPFQKPNYTEIRQYCNHWRNFADIDDSWASIKSILDWTSRNQERIVDVAGPGGWNDPDMLVIGNFGLSWDQQVTQMALWAIMAHPLFMSNDLRAISPQAKALLQDKDVIAINQDPLGKQGYQLRKGDNFEVWERPLSGDAWAVAIINRQEIGGPRSYTIPVASLGKGVACNPACFITQLLPVKRKLGFYEATSRLRSHINPTGTVLLQLENTMQTSLKDLL

SEQ ID NO: 1309 - DNA, 1194 bp, Artificial Sequence
  variant of human alpha-galactosidase A
ctggataatggattggctagaacacctcctatggggtggcttcactgggagaggttcatgtgcaacctggactgtcaggaagaaccagacagctgcatctccgagaagctctttgaggaaatggccgaacgaatggtgactgagggctggaaagatgcaggttacgagtatctgtgtattgacgattgctggatggccccacaacgggattctgagggaagacttcaggctgatccgcagcgcttccctcatggcataaggcagctggcaaaccacgtccacagtaaggggctcaaattgggaatctacgcggacgtgggcaataagacctgtgccggttttccgggatcattcgggtattatgacattgacgcccaaacgtttgctgattggggcgttgacctgctgaaattcgatggttgctactgtgacagcctcgaaaacctggcagacggctacaagcatatgtctctcgccctgaatagaaccggtcggccaatcgtatattcctgcgagtggcctctttacatgtggccatttcagaaaccgaactacacagaaattcgccagtattgcaatcattggaggaacttcgctgatatcgatgactcatgggcctccataaagagcatcttggactggaccagtcggaatcaggagcgaattgtggatgtcgcaggccctggaggatggaacgatccagacatgctggtgatcggcaattttggcctctcttgggaccagcaggttacccaaatggctctgtgggcaattatggccattcctcttttcatgagcaacgatctgcgcgcgatctcaccacaggcaaaggccctgctccaagacaaagatgtgatagccatcaatcaggacccgttgggaaagcagggctaccagctgagaaaaggcgacaactttgaggtctgggaaaggcctttgagtggagatgcgtgggctgtggccattattaatcggcaagagatcggaggtccacgctcctatacaattcctgtagcatctcttggcaagggcgttgcctgtaacccagcttgcttcatcactcagcttctgccggtgaagagaaaactgggtttctacgaagctaccagcaggctccgatcccacatcaaccctacaggaaccgtcctcttgcagctggagaatacgatgcagacttcactgaaggacctcctg

SEQ ID NO: 1310 - protein, 398 aa, Artificial Sequence
  variant of human alpha-galactosidase A
LDNGLARTPPMGWLHWERFMCNLDCQEEPDSCISEKLFEEMAERMVTEGWKDAGYEYLCIDDCWMAPQRDSEGRLQADPQRFPHGIRQLANHVHSKGLKLGIYADVGNKTCAGFPGSFGYYDIDAQTFADWGVDLLKFDGCYCDSLENLADGYKHMSLALNRTGRPIVYSCEWPLYMWPFQKPNYTEIRQYCNHWRNFADIDDSWASIKSILDWTSRNQERIVDVAGPGGWNDPDMLVIGNFGLSWDQQVTQMALWAIMAIPLFMSNDLRAISPQAKALLQDKDVIAINQDPLGKQGYQLRKGDNFEVWERPLSGDAWAVAIINRQEIGGPRSYTIPVASLGKGVACNPACFITQLLPVKRKLGFYEATSRLRSHINPTGTVLLQLENTMQTSLKDLL

SEQ ID NO: 1311 - DNA, 1194 bp, Artificial Sequence
  variant of human alpha-galactosidase A
ctggataatggattggctagaacacctcctatggggtggcttcactgggagaggttcatgtgcaacctggactgtcaggaagaaccagacagctgcatctccgagaagctctttgaggaaatggccgaacgaatggtgactgagggctggaaagatgcaggttacgagtatctgtgtattgacgattgctggatggccccacaacgggattctgagggaagacttcaggctgatccgcagcgcttccctcatggcataaggcagctggcaaaccacgtccacagtaaggggctcaaattgggaatctacgcggacgtgggcaataagacctgtgccggttttccgggatcattcgggtattatgacattgacgcccaaacgtttgctgattggggcgttgacctgctgaaattcgatggttgctactgtgacagcctcgaaaacctggcagacggctacaagcatatgtctctcgccctgaatagaaccggtcggccaatcgtatattcctgcgagtggcctctttacatgtggccatttcagaaaccgaactacacagaaattcgccagtattgcaatcattggaggaacttcgctgatatcgatgactcatgggcctccataaagagcatcttggactggaccagtcggaatcaggagcgaattgtggatgtcgcaggccctggaggatggaacgatccagacatgctggtgatcggcaattttggcctctcttgggaccagcaggttacccaaatggctctgtgggcaattatggccaagcctcttttcatgagcaacgatctgcgcgcgatctcaccacaggcaaaggccctgctccaagacaaagatgtgatagccatcaatcaggacccgttgggaaagcagggctaccagctgagaaaaggcgacaactttgaggtctgggaaaggcctttgagtggagatgcgtgggctgtggccattattaatcggcaagagatcggaggtccacgctcctatacaattcctgtagcatctcttggcaagggcgttgcctgtaacccagcttgcttcatcactcagcttctgccggtgaagagaaaactgggtttctacgaagctaccagcaggctccgatcccacatcaaccctacaggaaccgtcctcttgcagctggagaatacgatgcagacttcactgaaggacctcctg

SEQ ID NO: 1312 - protein, 398 aa, Artificial Sequence
  variant of human alpha-galactosidase A
LDNGLARTPPMGWLHWERFMCNLDCQEEPDSCISEKLFEEMAERMVTEGWKDAGYEYLCIDDCWMAPQRDSEGRLQADPQRFPHGIRQLANHVHSKGLKLGIYADVGNKTCAGFPGSFGYYDIDAQTFADWGVDLLKFDGCYCDSLENLADGYKHMSLALNRTGRPIVYSCEWPLYMWPFQKPNYTEIRQYCNHWRNFADIDDSWASIKSILDWTSRNQERIVDVAGPGGWNDPDMLVIGNFGLSWDQQVTQMALWAIMAKPLFMSNDLRAISPQAKALLQDKDVIAINQDPLGKQGYQLRKGDNFEVWERPLSGDAWAVAIINRQEIGGPRSYTIPVASLGKGVACNPACFITQLLPVKRKLGFYEATSRLRSHINPTGTVLLQLENTMQTSLKDLL

SEQ ID NO: 1313 - DNA, 1194 bp, Artificial Sequence
  variant of human alpha-galactosidase A
ctggataatggattggctagaacacctcctatggggtggcttcactgggagaggttcatgtgcaacctggactgtcaggaagaaccagacagctgcatctccgagaagctctttgaggaaatggccgaacgaatggtgactgagggctggaaagatgcaggttacgagtatctgtgtattgacgattgctggatggccccacaacgggattctgagggaagacttcaggctgatccgcagcgcttccctcatggcataaggcagctggcaaaccacgtccacagtaaggggctcaaattgggaatctacgcggacgtgggcaataagacctgtgccggttttccgggatcattcgggtattatgacattgacgcccaaacgtttgctgattggggcgttgacctgctgaaattcgatggttgctactgtgacagcctcgaaaacctggcagacggctacaagcatatgtctctcgccctgaatagaaccggtcggccaatcgtatattcctgcgagtggcctctttacatgtggccatttcagaaaccgaactacacagaaattcgccagtattgcaatcattggaggaacttcgctgatatcgatgactcatgggcctccataaagagcatcttggactggaccagtcggaatcaggagcgaattgtggatgtcgcaggccctggaggatggaacgatccagacatgctggtgatcggcaattttggcctctcttgggaccagcaggttacccaaatggctctgtgggcaattatggccttgcctcttttcatgagcaacgatctgcgcgcgatctcaccacaggcaaaggccctgctccaagacaaagatgtgatagccatcaatcaggacccgttgggaaagcagggctaccagctgagaaaaggcgacaactttgaggtctgggaaaggcctttgagtggagatgcgtgggctgtggccattattaatcggcaagagatcggaggtccacgctcctatacaattcctgtagcatctcttggcaagggcgttgcctgtaacccagcttgcttcatcactcagcttctgccggtgaagagaaaactgggtttctacgaagctaccagcaggctccgatcccacatcaaccctacaggaaccgtcctcttgcagctggagaatacgatgcagacttcactgaaggacctcctg

SEQ ID NO: 1314 - protein, 398 aa, Artificial Sequence
  variant of human alpha-galactosidase A
LDNGLARTPPMGWLHWERFMCNLDCQEEPDSCISEKLFEEMAERMVTEGWKDAGYEYLCIDDCWMAPQRDSEGRLQADPQRFPHGIRQLANHVHSKGLKLGIYADVGNKTCAGFPGSFGYYDIDAQTFADWGVDLLKFDGCYCDSLENLADGYKHMSLALNRTGRPIVYSCEWPLYMWPFQKPNYTEIRQYCNHWRNFADIDDSWASIKSILDWTSRNQERIVDVAGPGGWNDPDMLVIGNFGLSWDQQVTQMALWAIMALPLFMSNDLRAISPQAKALLQDKDVIAINQDPLGKQGYQLRKGDNFEVWERPLSGDAWAVAIINRQEIGGPRSYTIPVASLGKGVACNPACFITQLLPVKRKLGFYEATSRLRSHINPTGTVLLQLENTMQTSLKDLL

SEQ ID NO: 1315 - DNA, 1194 bp, Artificial Sequence
  variant of human alpha-galactosidase A
ctggataatggattggctagaacacctcctatggggtggcttcactgggagaggttcatgtgcaacctggactgtcaggaagaaccagacagctgcatctccgagaagctctttgaggaaatggccgaacgaatggtgactgagggctggaaagatgcaggttacgagtatctgtgtattgacgattgctggatggccccacaacgggattctgagggaagacttcaggctgatccgcagcgcttccctcatggcataaggcagctggcaaaccacgtccacagtaaggggctcaaattgggaatctacgcggacgtgggcaataagacctgtgccggttttccgggatcattcgggtattatgacattgacgcccaaacgtttgctgattggggcgttgacctgctgaaattcgatggttgctactgtgacagcctcgaaaacctggcagacggctacaagcatatgtctctcgccctgaatagaaccggtcggccaatcgtatattcctgcgagtggcctctttacatgtggccatttcagaaaccgaactacacagaaattcgccagtattgcaatcattggaggaacttcgctgatatcgatgactcatgggcctccataaagagcatcttggactggaccagtcggaatcaggagcgaattgtggatgtcgcaggccctggaggatggaacgatccagacatgctggtgatcggcaattttggcctctcttgggaccagcaggttacccaaatggctctgtgggcaattatggccatgcctcttttcatgagcaacgatctgcgcgcgatctcaccacaggcaaaggccctgctccaagacaaagatgtgatagccatcaatcaggacccgttgggaaagcagggctaccagctgagaaaaggcgacaactttgaggtctgggaaaggcctttgagtggagatgcgtgggctgtggccattattaatcggcaagagatcggaggtccacgctcctatacaattcctgtagcatctcttggcaagggcgttgcctgtaacccagcttgcttcatcactcagcttctgccggtgaagagaaaactgggtttctacgaagctaccagcaggctccgatcccacatcaaccctacaggaaccgtcctcttgcagctggagaatacgatgcagacttcactgaaggacctcctg

SEQ ID NO: 1316 - protein, 398 aa, Artificial Sequence
  variant of human alpha-galactosidase A
LDNGLARTPPMGWLHWERFMCNLDCQEEPDSCISEKLFEEMAERMVTEGWKDAGYEYLCIDDCWMAPQRDSEGRLQADPQRFPHGIRQLANHVHSKGLKLGIYADVGNKTCAGFPGSFGYYDIDAQTFADWGVDLLKFDGCYCDSLENLADGYKHMSLALNRTGRPIVYSCEWPLYMWPFQKPNYTEIRQYCNHWRNFADIDDSWASIKSILDWTSRNQERIVDVAGPGGWNDPDMLVIGNFGLSWDQQVTQMALWAIMAMPLFMSNDLRAISPQAKALLQDKDVIAINQDPLGKQGYQLRKGDNFEVWERPLSGDAWAVAIINRQEIGGPRSYTIPVASLGKGVACNPACFITQLLPVKRKLGFYEATSRLRSHINPTGTVLLQLENTMQTSLKDLL

SEQ ID NO: 1317 - DNA, 1194 bp, Artificial Sequence
  variant of human alpha-galactosidase A
ctggataatggattggctagaacacctcctatggggtggcttcactgggagaggttcatgtgcaacctggactgtcaggaagaaccagacagctgcatctccgagaagctctttgaggaaatggccgaacgaatggtgactgagggctggaaagatgcaggttacgagtatctgtgtattgacgattgctggatggccccacaacgggattctgagggaagacttcaggctgatccgcagcgcttccctcatggcataaggcagctggcaaaccacgtccacagtaaggggctcaaattgggaatctacgcggacgtgggcaataagacctgtgccggttttccgggatcattcgggtattatgacattgacgcccaaacgtttgctgattggggcgttgacctgctgaaattcgatggttgctactgtgacagcctcgaaaacctggcagacggctacaagcatatgtctctcgccctgaatagaaccggtcggccaatcgtatattcctgcgagtggcctctttacatgtggccatttcagaaaccgaactacacagaaattcgccagtattgcaatcattggaggaacttcgctgatatcgatgactcatgggcctccataaagagcatcttggactggaccagtcggaatcaggagcgaattgtggatgtcgcaggccctggaggatggaacgatccagacatgctggtgatcggcaattttggcctctcttgggaccagcaggttacccaaatggctctgtgggcaattatggccaatcctcttttcatgagcaacgatctgcgcgcgatctcaccacaggcaaaggccctgctccaagacaaagatgtgatagccatcaatcaggacccgttgggaaagcagggctaccagctgagaaaaggcgacaactttgaggtctgggaaaggcctttgagtggagatgcgtgggctgtggccattattaatcggcaagagatcggaggtccacgctcctatacaattcctgtagcatctcttggcaagggcgttgcctgtaacccagcttgcttcatcactcagcttctgccggtgaagagaaaactgggtttctacgaagctaccagcaggctccgatcccacatcaaccctacaggaaccgtcctcttgcagctggagaatacgatgcagacttcactgaaggacctcctg

SEQ ID NO: 1318 - protein, 398 aa, Artificial Sequence
  variant of human alpha-galactosidase A
LDNGLARTPPMGWLHWERFMCNLDCQEEPDSCISEKLFEEMAERMVTEGWKDAGYEYLCIDDCWMAPQRDSEGRLQADPQRFPHGIRQLANHVHSKGLKLGIYADVGNKTCAGFPGSFGYYDIDAQTFADWGVDLLKFDGCYCDSLENLADGYKHMSLALNRTGRPIVYSCEWPLYMWPFQKPNYTEIRQYCNHWRNFADIDDSWASIKSILDWTSRNQERIVDVAGPGGWNDPDMLVIGNFGLSWDQQVTQMALWAIMANPLFMSNDLRAISPQAKALLQDKDVIAINQDPLGKQGYQLRKGDNFEVWERPLSGDAWAVAIINRQEIGGPRSYTIPVASLGKGVACNPACFITQLLPVKRKLGFYEATSRLRSHINPTGTVLLQLENTMQTSLKDLL

SEQ ID NO: 1319 - DNA, 1194 bp, Artificial Sequence
  variant of human alpha-galactosidase A
ctggataatggattggctagaacacctcctatggggtggcttcactgggagaggttcatgtgcaacctggactgtcaggaagaaccagacagctgcatctccgagaagctctttgaggaaatggccgaacgaatggtgactgagggctggaaagatgcaggttacgagtatctgtgtattgacgattgctggatggccccacaacgggattctgagggaagacttcaggctgatccgcagcgcttccctcatggcataaggcagctggcaaaccacgtccacagtaaggggctcaaattgggaatctacgcggacgtgggcaataagacctgtgccggttttccgggatcattcgggtattatgacattgacgcccaaacgtttgctgattggggcgttgacctgctgaaattcgatggttgctactgtgacagcctcgaaaacctggcagacggctacaagcatatgtctctcgccctgaatagaaccggtcggccaatcgtatattcctgcgagtggcctctttacatgtggccatttcagaaaccgaactacacagaaattcgccagtattgcaatcattggaggaacttcgctgatatcgatgactcatgggcctccataaagagcatcttggactggaccagtcggaatcaggagcgaattgtggatgtcgcaggccctggaggatggaacgatccagacatgctggtgatcggcaattttggcctctcttgggaccagcaggttacccaaatggctctgtgggcaattatggccccgcctcttttcatgagcaacgatctgcgcgcgatctcaccacaggcaaaggccctgctccaagacaaagatgtgatagccatcaatcaggacccgttgggaaagcagggctaccagctgagaaaaggcgacaactttgaggtctgggaaaggcctttgagtggagatgcgtgggctgtggccattattaatcggcaagagatcggaggtccacgctcctatacaattcctgtagcatctcttggcaagggcgttgcctgtaacccagcttgcttcatcactcagcttctgccggtgaagagaaaactgggtttctacgaagctaccagcaggctccgatcccacatcaaccctacaggaaccgtcctcttgcagctggagaatacgatgcagacttcactgaaggacctcctg

SEQ ID NO: 1320 - protein, 398 aa, Artificial Sequence
  variant of human alpha-galactosidase A
LDNGLARTPPMGWLHWERFMCNLDCQEEPDSCISEKLFEEMAERMVTEGWKDAGYEYLCIDDCWMAPQRDSEGRLQADPQRFPHGIRQLANHVHSKGLKLGIYADVGNKTCAGFPGSFGYYDIDAQTFADWGVDLLKFDGCYCDSLENLADGYKHMSLALNRTGRPIVYSCEWPLYMWPFQKPNYTEIRQYCNHWRNFADIDDSWASIKSILDWTSRNQERIVDVAGPGGWNDPDMLVIGNFGLSWDQQVTQMALWAIMAPPLFMSNDLRAISPQAKALLQDKDVIAINQDPLGKQGYQLRKGDNFEVWERPLSGDAWAVAIINRQEIGGPRSYTIPVASLGKGVACNPACFITQLLPVKRKLGFYEATSRLRSHINPTGTVLLQLENTMQTSLKDLL

SEQ ID NO: 1321 - DNA, 1194 bp, Artificial Sequence
  variant of human alpha-galactosidase A
ctggataatggattggctagaacacctcctatggggtggcttcactgggagaggttcatgtgcaacctggactgtcaggaagaaccagacagctgcatctccgagaagctctttgaggaaatggccgaacgaatggtgactgagggctggaaagatgcaggttacgagtatctgtgtattgacgattgctggatggccccacaacgggattctgagggaagacttcaggctgatccgcagcgcttccctcatggcataaggcagctggcaaaccacgtccacagtaaggggctcaaattgggaatctacgcggacgtgggcaataagacctgtgccggttttccgggatcattcgggtattatgacattgacgcccaaacgtttgctgattggggcgttgacctgctgaaattcgatggttgctactgtgacagcctcgaaaacctggcagacggctacaagcatatgtctctcgccctgaatagaaccggtcggccaatcgtatattcctgcgagtggcctctttacatgtggccatttcagaaaccgaactacacagaaattcgccagtattgcaatcattggaggaacttcgctgatatcgatgactcatgggcctccataaagagcatcttggactggaccagtcggaatcaggagcgaattgtggatgtcgcaggccctggaggatggaacgatccagacatgctggtgatcggcaattttggcctctcttgggaccagcaggttacccaaatggctctgtgggcaattatggcccagcctcttttcatgagcaacgatctgcgcgcgatctcaccacaggcaaaggccctgctccaagacaaagatgtgatagccatcaatcaggacccgttgggaaagcagggctaccagctgagaaaaggcgacaactttgaggtctgggaaaggcctttgagtggagatgcgtgggctgtggccattattaatcggcaagagatcggaggtccacgctcctatacaattcctgtagcatctcttggcaagggcgttgcctgtaacccagcttgcttcatcactcagcttctgccggtgaagagaaaactgggtttctacgaagctaccagcaggctccgatcccacatcaaccctacaggaaccgtcctcttgcagctggagaatacgatgcagacttcactgaaggacctcctg

SEQ ID NO: 1322 - protein, 398 aa, Artificial Sequence
  variant of human alpha-galactosidase A
LDNGLARTPPMGWLHWERFMCNLDCQEEPDSCISEKLFEEMAERMVTEGWKDAGYEYLCIDDCWMAPQRDSEGRLQADPQRFPHGIRQLANHVHSKGLKLGIYADVGNKTCAGFPGSFGYYDIDAQTFADWGVDLLKFDGCYCDSLENLADGYKHMSLALNRTGRPIVYSCEWPLYMWPFQKPNYTEIRQYCNHWRNFADIDDSWASIKSILDWTSRNQERIVDVAGPGGWNDPDMLVIGNFGLSWDQQVTQMALWAIMAQPLFMSNDLRAISPQAKALLQDKDVIAINQDPLGKQGYQLRKGDNFEVWERPLSGDAWAVAIINRQEIGGPRSYTIPVASLGKGVACNPACFITQLLPVKRKLGFYEATSRLRSHINPTGTVLLQLENTMQTSLKDLL

SEQ ID NO: 1323 - DNA, 1194 bp, Artificial Sequence
  variant of human alpha-galactosidase A
ctggataatggattggctagaacacctcctatggggtggcttcactgggagaggttcatgtgcaacctggactgtcaggaagaaccagacagctgcatctccgagaagctctttgaggaaatggccgaacgaatggtgactgagggctggaaagatgcaggttacgagtatctgtgtattgacgattgctggatggccccacaacgggattctgagggaagacttcaggctgatccgcagcgcttccctcatggcataaggcagctggcaaaccacgtccacagtaaggggctcaaattgggaatctacgcggacgtgggcaataagacctgtgccggttttccgggatcattcgggtattatgacattgacgcccaaacgtttgctgattggggcgttgacctgctgaaattcgatggttgctactgtgacagcctcgaaaacctggcagacggctacaagcatatgtctctcgccctgaatagaaccggtcggccaatcgtatattcctgcgagtggcctctttacatgtggccatttcagaaaccgaactacacagaaattcgccagtattgcaatcattggaggaacttcgctgatatcgatgactcatgggcctccataaagagcatcttggactggaccagtcggaatcaggagcgaattgtggatgtcgcaggccctggaggatggaacgatccagacatgctggtgatcggcaattttggcctctcttgggaccagcaggttacccaaatggctctgtgggcaattatggccaggcctcttttcatgagcaacgatctgcgcgcgatctcaccacaggcaaaggccctgctccaagacaaagatgtgatagccatcaatcaggacccgttgggaaagcagggctaccagctgagaaaaggcgacaactttgaggtctgggaaaggcctttgagtggagatgcgtgggctgtggccattattaatcggcaagagatcggaggtccacgctcctatacaattcctgtagcatctcttggcaagggcgttgcctgtaacccagcttgcttcatcactcagcttctgccggtgaagagaaaactgggtttctacgaagctaccagcaggctccgatcccacatcaaccctacaggaaccgtcctcttgcagctggagaatacgatgcagacttcactgaaggacctcctg

SEQ ID NO: 1324 - protein, 398 aa, Artificial Sequence
  variant of human alpha-galactosidase A
LDNGLARTPPMGWLHWERFMCNLDCQEEPDSCISEKLFEEMAERMVTEGWKDAGYEYLCIDDCWMAPQRDSEGRLQADPQRFPHGIRQLANHVHSKGLKLGIYADVGNKTCAGFPGSFGYYDIDAQTFADWGVDLLKFDGCYCDSLENLADGYKHMSLALNRTGRPIVYSCEWPLYMWPFQKPNYTEIRQYCNHWRNFADIDDSWASIKSILDWTSRNQERIVDVAGPGGWNDPDMLVIGNFGLSWDQQVTQMALWAIMARPLFMSNDLRAISPQAKALLQDKDVIAINQDPLGKQGYQLRKGDNFEVWERPLSGDAWAVAIINRQEIGGPRSYTIPVASLGKGVACNPACFITQLLPVKRKLGFYEATSRLRSHINPTGTVLLQLENTMQTSLKDLL

SEQ ID NO: 1325 - DNA, 1194 bp, Artificial Sequence
  variant of human alpha-galactosidase A
ctggataatggattggctagaacacctcctatggggtggcttcactgggagaggttcatgtgcaacctggactgtcaggaagaaccagacagctgcatctccgagaagctctttgaggaaatggccgaacgaatggtgactgagggctggaaagatgcaggttacgagtatctgtgtattgacgattgctggatggccccacaacgggattctgagggaagacttcaggctgatccgcagcgcttccctcatggcataaggcagctggcaaaccacgtccacagtaaggggctcaaattgggaatctacgcggacgtgggcaataagacctgtgccggttttccgggatcattcgggtattatgacattgacgcccaaacgtttgctgattggggcgttgacctgctgaaattcgatggttgctactgtgacagcctcgaaaacctggcagacggctacaagcatatgtctctcgccctgaatagaaccggtcggccaatcgtatattcctgcgagtggcctctttacatgtggccatttcagaaaccgaactacacagaaattcgccagtattgcaatcattggaggaacttcgctgatatcgatgactcatgggcctccataaagagcatcttggactggaccagtcggaatcaggagcgaattgtggatgtcgcaggccctggaggatggaacgatccagacatgctggtgatcggcaattttggcctctcttgggaccagcaggttacccaaatggctctgtgggcaattatggcctcgcctcttttcatgagcaacgatctgcgcgcgatctcaccacaggcaaaggccctgctccaagacaaagatgtgatagccatcaatcaggacccgttgggaaagcagggctaccagctgagaaaaggcgacaactttgaggtctgggaaaggcctttgagtggagatgcgtgggctgtggccattattaatcggcaagagatcggaggtccacgctcctatacaattcctgtagcatctcttggcaagggcgttgcctgtaacccagcttgcttcatcactcagcttctgccggtgaagagaaaactgggtttctacgaagctaccagcaggctccgatcccacatcaaccctacaggaaccgtcctcttgcagctggagaatacgatgcagacttcactgaaggacctcctg

SEQ ID NO: 1326 - protein, 398 aa, Artificial Sequence
  variant of human alpha-galactosidase A
LDNGLARTPPMGWLHWERFMCNLDCQEEPDSCISEKLFEEMAERMVTEGWKDAGYEYLCIDDCWMAPQRDSEGRLQADPQRFPHGIRQLANHVHSKGLKLGIYADVGNKTCAGFPGSFGYYDIDAQTFADWGVDLLKFDGCYCDSLENLADGYKHMSLALNRTGRPIVYSCEWPLYMWPFQKPNYTEIRQYCNHWRNFADIDDSWASIKSILDWTSRNQERIVDVAGPGGWNDPDMLVIGNFGLSWDQQVTQMALWAIMASPLFMSNDLRAISPQAKALLQDKDVIAINQDPLGKQGYQLRKGDNFEVWERPLSGDAWAVAIINRQEIGGPRSYTIPVASLGKGVACNPACFITQLLPVKRKLGFYEATSRLRSHINPTGTVLLQLENTMQTSLKDLL

SEQ ID NO: 1327 - DNA, 1194 bp, Artificial Sequence
  variant of human alpha-galactosidase A
ctggataatggattggctagaacacctcctatggggtggcttcactgggagaggttcatgtgcaacctggactgtcaggaagaaccagacagctgcatctccgagaagctctttgaggaaatggccgaacgaatggtgactgagggctggaaagatgcaggttacgagtatctgtgtattgacgattgctggatggccccacaacgggattctgagggaagacttcaggctgatccgcagcgcttccctcatggcataaggcagctggcaaaccacgtccacagtaaggggctcaaattgggaatctacgcggacgtgggcaataagacctgtgccggttttccgggatcattcgggtattatgacattgacgcccaaacgtttgctgattggggcgttgacctgctgaaattcgatggttgctactgtgacagcctcgaaaacctggcagacggctacaagcatatgtctctcgccctgaatagaaccggtcggccaatcgtatattcctgcgagtggcctctttacatgtggccatttcagaaaccgaactacacagaaattcgccagtattgcaatcattggaggaacttcgctgatatcgatgactcatgggcctccataaagagcatcttggactggaccagtcggaatcaggagcgaattgtggatgtcgcaggccctggaggatggaacgatccagacatgctggtgatcggcaattttggcctctcttgggaccagcaggttacccaaatggctctgtgggcaattatggccacgcctcttttcatgagcaacgatctgcgcgcgatctcaccacaggcaaaggccctgctccaagacaaagatgtgatagccatcaatcaggacccgttgggaaagcagggctaccagctgagaaaaggcgacaactttgaggtctgggaaaggcctttgagtggagatgcgtgggctgtggccattattaatcggcaagagatcggaggtccacgctcctatacaattcctgtagcatctcttggcaagggcgttgcctgtaacccagcttgcttcatcactcagcttctgccggtgaagagaaaactgggtttctacgaagctaccagcaggctccgatcccacatcaaccctacaggaaccgtcctcttgcagctggagaatacgatgcagacttcactgaaggacctcctg

SEQ ID NO: 1328 - protein, 398 aa, Artificial Sequence
  variant of human alpha-galactosidase A
LDNGLARTPPMGWLHWERFMCNLDCQEEPDSCISEKLFEEMAERMVTEGWKDAGYEYLCIDDCWMAPQRDSEGRLQADPQRFPHGIRQLANHVHSKGLKLGIYADVGNKTCAGFPGSFGYYDIDAQTFADWGVDLLKFDGCYCDSLENLADGYKHMSLALNRTGRPIVYSCEWPLYMWPFQKPNYTEIRQYCNHWRNFADIDDSWASIKSILDWTSRNQERIVDVAGPGGWNDPDMLVIGNFGLSWDQQVTQMALWAIMATPLFMSNDLRAISPQAKALLQDKDVIAINQDPLGKQGYQLRKGDNFEVWERPLSGDAWAVAIINRQEIGGPRSYTIPVASLGKGVACNPACFITQLLPVKRKLGFYEATSRLRSHINPTGTVLLQLENTMQTSLKDLL

SEQ ID NO: 1329 - DNA, 1194 bp, Artificial Sequence
  variant of human alpha-galactosidase A
ctggataatggattggctagaacacctcctatggggtggcttcactgggagaggttcatgtgcaacctggactgtcaggaagaaccagacagctgcatctccgagaagctctttgaggaaatggccgaacgaatggtgactgagggctggaaagatgcaggttacgagtatctgtgtattgacgattgctggatggccccacaacgggattctgagggaagacttcaggctgatccgcagcgcttccctcatggcataaggcagctggcaaaccacgtccacagtaaggggctcaaattgggaatctacgcggacgtgggcaataagacctgtgccggttttccgggatcattcgggtattatgacattgacgcccaaacgtttgctgattggggcgttgacctgctgaaattcgatggttgctactgtgacagcctcgaaaacctggcagacggctacaagcatatgtctctcgccctgaatagaaccggtcggccaatcgtatattcctgcgagtggcctctttacatgtggccatttcagaaaccgaactacacagaaattcgccagtattgcaatcattggaggaacttcgctgatatcgatgactcatgggcctccataaagagcatcttggactggaccagtcggaatcaggagcgaattgtggatgtcgcaggccctggaggatggaacgatccagacatgctggtgatcggcaattttggcctctcttgggaccagcaggttacccaaatggctctgtgggcaattatggccgtgcctcttttcatgagcaacgatctgcgcgcgatctcaccacaggcaaaggccctgctccaagacaaagatgtgatagccatcaatcaggacccgttgggaaagcagggctaccagctgagaaaaggcgacaactttgaggtctgggaaaggcctttgagtggagatgcgtgggctgtggccattattaatcggcaagagatcggaggtccacgctcctatacaattcctgtagcatctcttggcaagggcgttgcctgtaacccagcttgcttcatcactcagcttctgccggtgaagagaaaactgggtttctacgaagctaccagcaggctccgatcccacatcaaccctacaggaaccgtcctcttgcagctggagaatacgatgcagacttcactgaaggacctcctg

SEQ ID NO: 1330 - protein, 398 aa, Artificial Sequence
  variant of human alpha-galactosidase A
LDNGLARTPPMGWLHWERFMCNLDCQEEPDSCISEKLFEEMAERMVTEGWKDAGYEYLCIDDCWMAPQRDSEGRLQADPQRFPHGIRQLANHVHSKGLKLGIYADVGNKTCAGFPGSFGYYDIDAQTFADWGVDLLKFDGCYCDSLENLADGYKHMSLALNRTGRPIVYSCEWPLYMWPFQKPNYTEIRQYCNHWRNFADIDDSWASIKSILDWTSRNQERIVDVAGPGGWNDPDMLVIGNFGLSWDQQVTQMALWAIMAVPLFMSNDLRAISPQAKALLQDKDVIAINQDPLGKQGYQLRKGDNFEVWERPLSGDAWAVAIINRQEIGGPRSYTIPVASLGKGVACNPACFITQLLPVKRKLGFYEATSRLRSHINPTGTVLLQLENTMQTSLKDLL

SEQ ID NO: 1331 - DNA, 1194 bp, Artificial Sequence
  variant of human alpha-galactosidase A
ctggataatggattggctagaacacctcctatggggtggcttcactgggagaggttcatgtgcaacctggactgtcaggaagaaccagacagctgcatctccgagaagctctttgaggaaatggccgaacgaatggtgactgagggctggaaagatgcaggttacgagtatctgtgtattgacgattgctggatggccccacaacgggattctgagggaagacttcaggctgatccgcagcgcttccctcatggcataaggcagctggcaaaccacgtccacagtaaggggctcaaattgggaatctacgcggacgtgggcaataagacctgtgccggttttccgggatcattcgggtattatgacattgacgcccaaacgtttgctgattggggcgttgacctgctgaaattcgatggttgctactgtgacagcctcgaaaacctggcagacggctacaagcatatgtctctcgccctgaatagaaccggtcggccaatcgtatattcctgcgagtggcctctttacatgtggccatttcagaaaccgaactacacagaaattcgccagtattgcaatcattggaggaacttcgctgatatcgatgactcatgggcctccataaagagcatcttggactggaccagtcggaatcaggagcgaattgtggatgtcgcaggccctggaggatggaacgatccagacatgctggtgatcggcaattttggcctctcttgggaccagcaggttacccaaatggctctgtgggcaattatggcctggcctcttttcatgagcaacgatctgcgcgcgatctcaccacaggcaaaggccctgctccaagacaaagatgtgatagccatcaatcaggacccgttgggaaagcagggctaccagctgagaaaaggcgacaactttgaggtctgggaaaggcctttgagtggagatgcgtgggctgtggccattattaatcggcaagagatcggaggtccacgctcctatacaattcctgtagcatctcttggcaagggcgttgcctgtaacccagcttgcttcatcactcagcttctgccggtgaagagaaaactgggtttctacgaagctaccagcaggctccgatcccacatcaaccctacaggaaccgtcctcttgcagctggagaatacgatgcagacttcactgaaggacctcctg

SEQ ID NO: 1332 - protein, 398 aa, Artificial Sequence
  variant of human alpha-galactosidase A
LDNGLARTPPMGWLHWERFMCNLDCQEEPDSCISEKLFEEMAERMVTEGWKDAGYEYLCIDDCWMAPQRDSEGRLQADPQRFPHGIRQLANHVHSKGLKLGIYADVGNKTCAGFPGSFGYYDIDAQTFADWGVDLLKFDGCYCDSLENLADGYKHMSLALNRTGRPIVYSCEWPLYMWPFQKPNYTEIRQYCNHWRNFADIDDSWASIKSILDWTSRNQERIVDVAGPGGWNDPDMLVIGNFGLSWDQQVTQMALWAIMAWPLFMSNDLRAISPQAKALLQDKDVIAINQDPLGKQGYQLRKGDNFEVWERPLSGDAWAVAIINRQEIGGPRSYTIPVASLGKGVACNPACFITQLLPVKRKLGFYEATSRLRSHINPTGTVLLQLENTMQTSLKDLL

SEQ ID NO: 1333 - DNA, 1194 bp, Artificial Sequence
  variant of human alpha-galactosidase A
ctggataatggattggctagaacacctcctatggggtggcttcactgggagaggttcatgtgcaacctggactgtcaggaagaaccagacagctgcatctccgagaagctctttgaggaaatggccgaacgaatggtgactgagggctggaaagatgcaggttacgagtatctgtgtattgacgattgctggatggccccacaacgggattctgagggaagacttcaggctgatccgcagcgcttccctcatggcataaggcagctggcaaaccacgtccacagtaaggggctcaaattgggaatctacgcggacgtgggcaataagacctgtgccggttttccgggatcattcgggtattatgacattgacgcccaaacgtttgctgattggggcgttgacctgctgaaattcgatggttgctactgtgacagcctcgaaaacctggcagacggctacaagcatatgtctctcgccctgaatagaaccggtcggccaatcgtatattcctgcgagtggcctctttacatgtggccatttcagaaaccgaactacacagaaattcgccagtattgcaatcattggaggaacttcgctgatatcgatgactcatgggcctccataaagagcatcttggactggaccagtcggaatcaggagcgaattgtggatgtcgcaggccctggaggatggaacgatccagacatgctggtgatcggcaattttggcctctcttgggaccagcaggttacccaaatggctctgtgggcaattatggcctatcctcttttcatgagcaacgatctgcgcgcgatctcaccacaggcaaaggccctgctccaagacaaagatgtgatagccatcaatcaggacccgttgggaaagcagggctaccagctgagaaaaggcgacaactttgaggtctgggaaaggcctttgagtggagatgcgtgggctgtggccattattaatcggcaagagatcggaggtccacgctcctatacaattcctgtagcatctcttggcaagggcgttgcctgtaacccagcttgcttcatcactcagcttctgccggtgaagagaaaactgggtttctacgaagctaccagcaggctccgatcccacatcaaccctacaggaaccgtcctcttgcagctggagaatacgatgcagacttcactgaaggacctcctg

SEQ ID NO: 1334 - protein, 398 aa, Artificial Sequence
  variant of human alpha-galactosidase A
LDNGLARTPPMGWLHWERFMCNLDCQEEPDSCISEKLFEEMAERMVTEGWKDAGYEYLCIDDCWMAPQRDSEGRLQADPQRFPHGIRQLANHVHSKGLKLGIYADVGNKTCAGFPGSFGYYDIDAQTFADWGVDLLKFDGCYCDSLENLADGYKHMSLALNRTGRPIVYSCEWPLYMWPFQKPNYTEIRQYCNHWRNFADIDDSWASIKSILDWTSRNQERIVDVAGPGGWNDPDMLVIGNFGLSWDQQVTQMALWAIMAYPLFMSNDLRAISPQAKALLQDKDVIAINQDPLGKQGYQLRKGDNFEVWERPLSGDAWAVAIINRQEIGGPRSYTIPVASLGKGVACNPACFITQLLPVKRKLGFYEATSRLRSHINPTGTVLLQLENTMQTSLKDLL

SEQ ID NO: 1335 - DNA, 1194 bp, Artificial Sequence
  variant of human alpha-galactosidase A
ctggataatggattggctagaacacctcctatggggtggcttcactgggagaggttcatgtgcaacctggactgtcaggaagaaccagacagctgcatctccgagaagctctttgaggaaatggccgaacgaatggtgactgagggctggaaagatgcaggttacgagtatctgtgtattgacgattgctggatggccccacaacgggattctgagggaagacttcaggctgatccgcagcgcttccctcatggcataaggcagctggcaaacgctgtccacagtaaggggctcaaattgggaatctacgcggacgtgggcaataagacctgtgccggttttccgggatcattcgggtattatgacattgacgcccaaacgtttgctgattggggcgttgacctgctgaaattcgatggttgctactgtgacagcctcgaaaacctggcagacggctacaagcatatgtctctcgccctgaatagaaccggtcggccaatcgtatattcctgcgagtggcctctttacatgtggccatttcagaaaccgaactacacagaaattcgccagtattgcaatcattggaggaacttcgctgatatcgatgactcatgggcctccataaagagcatcttggactggaccagtcggaatcaggagcgaattgtggatgtcgcaggccctggaggatggaacgatccagacatgctggtgatcggcaattttggcctctcttgggaccagcaggttacccaaatggctctgtgggcaattatggccggtcctcttttcatgagcaacgatctgcgcgcgatctcaccacaggcaaaggccctgctccaagacaaagatgtgatagccatcaatcaggacccgttgggaaagcagggctaccagctgagaaaaggcgacaactttgaggtctgggaaaggcctttgagtggagatgcgtgggctgtggccattattaatcggcaagagatcggaggtccacgctcctatacaattcctgtagcatctcttggcaagggcgttgcctgtaacccagcttgcttcatcactcagcttctgccggtgaagagaaaactgggtttctacgaagctaccagcaggctccgatcccacatcaaccctacaggaaccgtcctcttgcagctggagaatacgatgcagacttcactgaaggacctcctg

SEQ ID NO: 1336 - protein, 398 aa, Artificial Sequence
  variant of human alpha-galactosidase A
LDNGLARTPPMGWLHWERFMCNLDCQEEPDSCISEKLFEEMAERMVTEGWKDAGYEYLCIDDCWMAPQRDSEGRLQADPQRFPHGIRQLANAVHSKGLKLGIYADVGNKTCAGFPGSFGYYDIDAQTFADWGVDLLKFDGCYCDSLENLADGYKHMSLALNRTGRPIVYSCEWPLYMWPFQKPNYTEIRQYCNHWRNFADIDDSWASIKSILDWTSRNQERIVDVAGPGGWNDPDMLVIGNFGLSWDQQVTQMALWAIMAGPLFMSNDLRAISPQAKALLQDKDVIAINQDPLGKQGYQLRKGDNFEVWERPLSGDAWAVAIINRQEIGGPRSYTIPVASLGKGVACNPACFITQLLPVKRKLGFYEATSRLRSHINPTGTVLLQLENTMQTSLKDLL

SEQ ID NO: 1337 - DNA, 1194 bp, Artificial Sequence
  variant of human alpha-galactosidase A
ctggataatggattggctagaacacctcctatggggtggcttcactgggagaggttcatgtgcaacctggactgtcaggaagaaccagacagctgcatctccgagaagctctttgaggaaatggccgaacgaatggtgactgagggctggaaagatgcaggttacgagtatctgtgtattgacgattgctggatggccccacaacgggattctgagggaagacttcaggctgatccgcagcgcttccctcatggcataaggcagctggcaaactgtgtccacagtaaggggctcaaattgggaatctacgcggacgtgggcaataagacctgtgccggttttccgggatcattcgggtattatgacattgacgcccaaacgtttgctgattggggcgttgacctgctgaaattcgatggttgctactgtgacagcctcgaaaacctggcagacggctacaagcatatgtctctcgccctgaatagaaccggtcggccaatcgtatattcctgcgagtggcctctttacatgtggccatttcagaaaccgaactacacagaaattcgccagtattgcaatcattggaggaacttcgctgatatcgatgactcatgggcctccataaagagcatcttggactggaccagtcggaatcaggagcgaattgtggatgtcgcaggccctggaggatggaacgatccagacatgctggtgatcggcaattttggcctctcttgggaccagcaggttacccaaatggctctgtgggcaattatggccggtcctcttttcatgagcaacgatctgcgcgcgatctcaccacaggcaaaggccctgctccaagacaaagatgtgatagccatcaatcaggacccgttgggaaagcagggctaccagctgagaaaaggcgacaactttgaggtctgggaaaggcctttgagtggagatgcgtgggctgtggccattattaatcggcaagagatcggaggtccacgctcctatacaattcctgtagcatctcttggcaagggcgttgcctgtaacccagcttgcttcatcactcagcttctgccggtgaagagaaaactgggtttctacgaagctaccagcaggctccgatcccacatcaaccctacaggaaccgtcctcttgcagctggagaatacgatgcagacttcactgaaggacctcctg

SEQ ID NO: 1338 - protein, 398 aa, Artificial Sequence
  variant of human alpha-galactosidase A
LDNGLARTPPMGWLHWERFMCNLDCQEEPDSCISEKLFEEMAERMVTEGWKDAGYEYLCIDDCWMAPQRDSEGRLQADPQRFPHGIRQLANCVHSKGLKLGIYADVGNKTCAGFPGSFGYYDIDAQTFADWGVDLLKFDGCYCDSLENLADGYKHMSLALNRTGRPIVYSCEWPLYMWPFQKPNYTEIRQYCNHWRNFADIDDSWASIKSILDWTSRNQERIVDVAGPGGWNDPDMLVIGNFGLSWDQQVTQMALWAIMAGPLFMSNDLRAISPQAKALLQDKDVIAINQDPLGKQGYQLRKGDNFEVWERPLSGDAWAVAIINRQEIGGPRSYTIPVASLGKGVACNPACFITQLLPVKRKLGFYEATSRLRSHINPTGTVLLQLENTMQTSLKDLL

SEQ ID NO: 1339 - DNA, 1194 bp, Artificial Sequence
  variant of human alpha-galactosidase A
ctggataatggattggctagaacacctcctatggggtggcttcactgggagaggttcatgtgcaacctggactgtcaggaagaaccagacagctgcatctccgagaagctctttgaggaaatggccgaacgaatggtgactgagggctggaaagatgcaggttacgagtatctgtgtattgacgattgctggatggccccacaacgggattctgagggaagacttcaggctgatccgcagcgcttccctcatggcataaggcagctggcaaacgatgtccacagtaaggggctcaaattgggaatctacgcggacgtgggcaataagacctgtgccggttttccgggatcattcgggtattatgacattgacgcccaaacgtttgctgattggggcgttgacctgctgaaattcgatggttgctactgtgacagcctcgaaaacctggcagacggctacaagcatatgtctctcgccctgaatagaaccggtcggccaatcgtatattcctgcgagtggcctctttacatgtggccatttcagaaaccgaactacacagaaattcgccagtattgcaatcattggaggaacttcgctgatatcgatgactcatgggcctccataaagagcatcttggactggaccagtcggaatcaggagcgaattgtggatgtcgcaggccctggaggatggaacgatccagacatgctggtgatcggcaattttggcctctcttgggaccagcaggttacccaaatggctctgtgggcaattatggccggtcctcttttcatgagcaacgatctgcgcgcgatctcaccacaggcaaaggccctgctccaagacaaagatgtgatagccatcaatcaggacccgttgggaaagcagggctaccagctgagaaaaggcgacaactttgaggtctgggaaaggcctttgagtggagatgcgtgggctgtggccattattaatcggcaagagatcggaggtccacgctcctatacaattcctgtagcatctcttggcaagggcgttgcctgtaacccagcttgcttcatcactcagcttctgccggtgaagagaaaactgggtttctacgaagctaccagcaggctccgatcccacatcaaccctacaggaaccgtcctcttgcagctggagaatacgatgcagacttcactgaaggacctcctg

SEQ ID NO: 1340 - protein, 398 aa, Artificial Sequence
  variant of human alpha-galactosidase A
LDNGLARTPPMGWLHWERFMCNLDCQEEPDSCISEKLFEEMAERMVTEGWKDAGYEYLCIDDCWMAPQRDSEGRLQADPQRFPHGIRQLANDVHSKGLKLGIYADVGNKTCAGFPGSFGYYDIDAQTFADWGVDLLKFDGCYCDSLENLADGYKHMSLALNRTGRPIVYSCEWPLYMWPFQKPNYTEIRQYCNHWRNFADIDDSWASIKSILDWTSRNQERIVDVAGPGGWNDPDMLVIGNFGLSWDQQVTQMALWAIMAGPLFMSNDLRAISPQAKALLQDKDVIAINQDPLGKQGYQLRKGDNFEVWERPLSGDAWAVAIINRQEIGGPRSYTIPVASLGKGVACNPACFITQLLPVKRKLGFYEATSRLRSHINPTGTVLLQLENTMQTSLKDLL

SEQ ID NO: 1341 - DNA, 1194 bp, Artificial Sequence
  variant of human alpha-galactosidase A
ctggataatggattggctagaacacctcctatggggtggcttcactgggagaggttcatgtgcaacctggactgtcaggaagaaccagacagctgcatctccgagaagctctttgaggaaatggccgaacgaatggtgactgagggctggaaagatgcaggttacgagtatctgtgtattgacgattgctggatggccccacaacgggattctgagggaagacttcaggctgatccgcagcgcttccctcatggcataaggcagctggcaaacgaggtccacagtaaggggctcaaattgggaatctacgcggacgtgggcaataagacctgtgccggttttccgggatcattcgggtattatgacattgacgcccaaacgtttgctgattggggcgttgacctgctgaaattcgatggttgctactgtgacagcctcgaaaacctggcagacggctacaagcatatgtctctcgccctgaatagaaccggtcggccaatcgtatattcctgcgagtggcctctttacatgtggccatttcagaaaccgaactacacagaaattcgccagtattgcaatcattggaggaacttcgctgatatcgatgactcatgggcctccataaagagcatcttggactggaccagtcggaatcaggagcgaattgtggatgtcgcaggccctggaggatggaacgatccagacatgctggtgatcggcaattttggcctctcttgggaccagcaggttacccaaatggctctgtgggcaattatggccggtcctcttttcatgagcaacgatctgcgcgcgatctcaccacaggcaaaggccctgctccaagacaaagatgtgatagccatcaatcaggacccgttgggaaagcagggctaccagctgagaaaaggcgacaactttgaggtctgggaaaggcctttgagtggagatgcgtgggctgtggccattattaatcggcaagagatcggaggtccacgctcctatacaattcctgtagcatctcttggcaagggcgttgcctgtaacccagcttgcttcatcactcagcttctgccggtgaagagaaaactgggtttctacgaagctaccagcaggctccgatcccacatcaaccctacaggaaccgtcctcttgcagctggagaatacgatgcagacttcactgaaggacctcctg

SEQ ID NO: 1342 - protein, 398 aa, Artificial Sequence
  variant of human alpha-galactosidase A
LDNGLARTPPMGWLHWERFMCNLDCQEEPDSCISEKLFEEMAERMVTEGWKDAGYEYLCIDDCWMAPQRDSEGRLQADPQRFPHGIRQLANEVHSKGLKLGIYADVGNKTCAGFPGSFGYYDIDAQTFADWGVDLLKFDGCYCDSLENLADGYKHMSLALNRTGRPIVYSCEWPLYMWPFQKPNYTEIRQYCNHWRNFADIDDSWASIKSILDWTSRNQERIVDVAGPGGWNDPDMLVIGNFGLSWDQQVTQMALWAIMAGPLFMSNDLRAISPQAKALLQDKDVIAINQDPLGKQGYQLRKGDNFEVWERPLSGDAWAVAIINRQEIGGPRSYTIPVASLGKGVACNPACFITQLLPVKRKLGFYEATSRLRSHINPTGTVLLQLENTMQTSLKDLL

SEQ ID NO: 1343 - DNA, 1194 bp, Artificial Sequence
  variant of human alpha-galactosidase A
ctggataatggattggctagaacacctcctatggggtggcttcactgggagaggttcatgtgcaacctggactgtcaggaagaaccagacagctgcatctccgagaagctctttgaggaaatggccgaacgaatggtgactgagggctggaaagatgcaggttacgagtatctgtgtattgacgattgctggatggccccacaacgggattctgagggaagacttcaggctgatccgcagcgcttccctcatggcataaggcagctggcaaactttgtccacagtaaggggctcaaattgggaatctacgcggacgtgggcaataagacctgtgccggttttccgggatcattcgggtattatgacattgacgcccaaacgtttgctgattggggcgttgacctgctgaaattcgatggttgctactgtgacagcctcgaaaacctggcagacggctacaagcatatgtctctcgccctgaatagaaccggtcggccaatcgtatattcctgcgagtggcctctttacatgtggccatttcagaaaccgaactacacagaaattcgccagtattgcaatcattggaggaacttcgctgatatcgatgactcatgggcctccataaagagcatcttggactggaccagtcggaatcaggagcgaattgtggatgtcgcaggccctggaggatggaacgatccagacatgctggtgatcggcaattttggcctctcttgggaccagcaggttacccaaatggctctgtgggcaattatggccggtcctcttttcatgagcaacgatctgcgcgcgatctcaccacaggcaaaggccctgctccaagacaaagatgtgatagccatcaatcaggacccgttgggaaagcagggctaccagctgagaaaaggcgacaactttgaggtctgggaaaggcctttgagtggagatgcgtgggctgtggccattattaatcggcaagagatcggaggtccacgctcctatacaattcctgtagcatctcttggcaagggcgttgcctgtaacccagcttgcttcatcactcagcttctgccggtgaagagaaaactgggtttctacgaagctaccagcaggctccgatcccacatcaaccctacaggaaccgtcctcttgcagctggagaatacgatgcagacttcactgaaggacctcctg

SEQ ID NO: 1344 - protein, 398 aa, Artificial Sequence; identical to SEQ ID NO: 230
  variant of human alpha-galactosidase A

SEQ ID NO: 1345 - DNA, 1194 bp, Artificial Sequence
  variant of human alpha-galactosidase A
ctggataatggattggctagaacacctcctatggggtggcttcactgggagaggttcatgtgcaacctggactgtcaggaagaaccagacagctgcatctccgagaagctctttgaggaaatggccgaacgaatggtgactgagggctggaaagatgcaggttacgagtatctgtgtattgacgattgctggatggccccacaacgggattctgagggaagacttcaggctgatccgcagcgcttccctcatggcataaggcagctggcaaacggtgtccacagtaaggggctcaaattgggaatctacgcggacgtgggcaataagacctgtgccggttttccgggatcattcgggtattatgacattgacgcccaaacgtttgctgattggggcgttgacctgctgaaattcgatggttgctactgtgacagcctcgaaaacctggcagacggctacaagcatatgtctctcgccctgaatagaaccggtcggccaatcgtatattcctgcgagtggcctctttacatgtggccatttcagaaaccgaactacacagaaattcgccagtattgcaatcattggaggaacttcgctgatatcgatgactcatgggcctccataaagagcatcttggactggaccagtcggaatcaggagcgaattgtggatgtcgcaggccctggaggatggaacgatccagacatgctggtgatcggcaattttggcctctcttgggaccagcaggttacccaaatggctctgtgggcaattatggccggtcctcttttcatgagcaacgatctgcgcgcgatctcaccacaggcaaaggccctgctccaagacaaagatgtgatagccatcaatcaggacccgttgggaaagcagggctaccagctgagaaaaggcgacaactttgaggtctgggaaaggcctttgagtggagatgcgtgggctgtggccattattaatcggcaagagatcggaggtccacgctcctatacaattcctgtagcatctcttggcaagggcgttgcctgtaacccagcttgcttcatcactcagcttctgccggtgaagagaaaactgggtttctacgaagctaccagcaggctccgatcccacatcaaccctacaggaaccgtcctcttgcagctggagaatacgatgcagacttcactgaaggacctcctg

SEQ ID NO: 1346 - protein, 398 aa, Artificial Sequence
  variant of human alpha-galactosidase A
LDNGLARTPPMGWLHWERFMCNLDCQEEPDSCISEKLFEEMAERMVTEGWKDAGYEYLCIDDCWMAPQRDSEGRLQADPQRFPHGIRQLANGVHSKGLKLGIYADVGNKTCAGFPGSFGYYDIDAQTFADWGVDLLKFDGCYCDSLENLADGYKHMSLALNRTGRPIVYSCEWPLYMWPFQKPNYTEIRQYCNHWRNFADIDDSWASIKSILDWTSRNQERIVDVAGPGGWNDPDMLVIGNFGLSWDQQVTQMALWAIMAGPLFMSNDLRAISPQAKALLQDKDVIAINQDPLGKQGYQLRKGDNFEVWERPLSGDAWAVAIINRQEIGGPRSYTIPVASLGKGVACNPACFITQLLPVKRKLGFYEATSRLRSHINPTGTVLLQLENTMQTSLKDLL

SEQ ID NO: 1347 - DNA, 1194 bp, Artificial Sequence
  variant of human alpha-galactosidase A
ctggataatggattggctagaacacctcctatggggtggcttcactgggagaggttcatgtgcaacctggactgtcaggaagaaccagacagctgcatctccgagaagctctttgaggaaatggccgaacgaatggtgactgagggctggaaagatgcaggttacgagtatctgtgtattgacgattgctggatggccccacaacgggattctgagggaagacttcaggctgatccgcagcgcttccctcatggcataaggcagctggcaaacatcgtccacagtaaggggctcaaattgggaatctacgcggacgtgggcaataagacctgtgccggttttccgggatcattcgggtattatgacattgacgcccaaacgtttgctgattggggcgttgacctgctgaaattcgatggttgctactgtgacagcctcgaaaacctggcagacggctacaagcatatgtctctcgccctgaatagaaccggtcggccaatcgtatattcctgcgagtggcctctttacatgtggccatttcagaaaccgaactacacagaaattcgccagtattgcaatcattggaggaacttcgctgatatcgatgactcatgggcctccataaagagcatcttggactggaccagtcggaatcaggagcgaattgtggatgtcgcaggccctggaggatggaacgatccagacatgctggtgatcggcaattttggcctctcttgggaccagcaggttacccaaatggctctgtgggcaattatggccggtcctcttttcatgagcaacgatctgcgcgcgatctcaccacaggcaaaggccctgctccaagacaaagatgtgatagccatcaatcaggacccgttgggaaagcagggctaccagctgagaaaaggcgacaactttgaggtctgggaaaggcctttgagtggagatgcgtgggctgtggccattattaatcggcaagagatcggaggtccacgctcctatacaattcctgtagcatctcttggcaagggcgttgcctgtaacccagcttgcttcatcactcagcttctgccggtgaagagaaaactgggtttctacgaagctaccagcaggctccgatcccacatcaaccctacaggaaccgtcctcttgcagctggagaatacgatgcagacttcactgaaggacctcctg

SEQ ID NO: 1348 - protein, 398 aa, Artificial Sequence
  variant of human alpha-galactosidase A
LDNGLARTPPMGWLHWERFMCNLDCQEEPDSCISEKLFEEMAERMVTEGWKDAGYEYLCIDDCWMAPQRDSEGRLQADPQRFPHGIRQLANIVHSKGLKLGIYADVGNKTCAGFPGSFGYYDIDAQTFADWGVDLLKFDGCYCDSLENLADGYKHMSLALNRTGRPIVYSCEWPLYMWPFQKPNYTEIRQYCNHWRNFADIDDSWASIKSILDWTSRNQERIVDVAGPGGWNDPDMLVIGNFGLSWDQQVTQMALWAIMAGPLFMSNDLRAISPQAKALLQDKDVIAINQDPLGKQGYQLRKGDNFEVWERPLSGDAWAVAIINRQEIGGPRSYTIPVASLGKGVACNPACFITQLLPVKRKLGFYEATSRLRSHINPTGTVLLQLENTMQTSLKDLL

SEQ ID NO: 1349 - DNA, 1194 bp, Artificial Sequence
  variant of human alpha-galactosidase A
ctggataatggattggctagaacacctcctatggggtggcttcactgggagaggttcatgtgcaacctggactgtcaggaagaaccagacagctgcatctccgagaagctctttgaggaaatggccgaacgaatggtgactgagggctggaaagatgcaggttacgagtatctgtgtattgacgattgctggatggccccacaacgggattctgagggaagacttcaggctgatccgcagcgcttccctcatggcataaggcagctggcaaacaaggtccacagtaaggggctcaaattgggaatctacgcggacgtgggcaataagacctgtgccggttttccgggatcattcgggtattatgacattgacgcccaaacgtttgctgattggggcgttgacctgctgaaattcgatggttgctactgtgacagcctcgaaaacctggcagacggctacaagcatatgtctctcgccctgaatagaaccggtcggccaatcgtatattcctgcgagtggcctctttacatgtggccatttcagaaaccgaactacacagaaattcgccagtattgcaatcattggaggaacttcgctgatatcgatgactcatgggcctccataaagagcatcttggactggaccagtcggaatcaggagcgaattgtggatgtcgcaggccctggaggatggaacgatccagacatgctggtgatcggcaattttggcctctcttgggaccagcaggttacccaaatggctctgtgggcaattatggccggtcctcttttcatgagcaacgatctgcgcgcgatctcaccacaggcaaaggccctgctccaagacaaagatgtgatagccatcaatcaggacccgttgggaaagcagggctaccagctgagaaaaggcgacaactttgaggtctgggaaaggcctttgagtggagatgcgtgggctgtggccattattaatcggcaagagatcggaggtccacgctcctatacaattcctgtagcatctcttggcaagggcgttgcctgtaacccagcttgcttcatcactcagcttctgccggtgaagagaaaactgggtttctacgaagctaccagcaggctccgatcccacatcaaccctacaggaaccgtcctcttgcagctggagaatacgatgcagacttcactgaaggacctcctg

SEQ ID NO: 1350 - protein, 398 aa, Artificial Sequence
  variant of human alpha-galactosidase A
LDNGLARTPPMGWLHWERFMCNLDCQEEPDSCISEKLFEEMAERMVTEGWKDAGYEYLCIDDCWMAPQRDSEGRLQADPQRFPHGIRQLANKVHSKGLKLGIYADVGNKTCAGFPGSFGYYDIDAQTFADWGVDLLKFDGCYCDSLENLADGYKHMSLALNRTGRPIVYSCEWPLYMWPFQKPNYTEIRQYCNHWRNFADIDDSWASIKSILDWTSRNQERIVDVAGPGGWNDPDMLVIGNFGLSWDQQVTQMALWAIMAGPLFMSNDLRAISPQAKALLQDKDVIAINQDPLGKQGYQLRKGDNFEVWERPLSGDAWAVAIINRQEIGGPRSYTIPVASLGKGVACNPACFITQLLPVKRKLGFYEATSRLRSHINPTGTVLLQLENTMQTSLKDLL

SEQ ID NO: 1351 - DNA, 1194 bp, Artificial Sequence
  variant of human alpha-galactosidase A
ctggataatggattggctagaacacctcctatggggtggcttcactgggagaggttcatgtgcaacctggactgtcaggaagaaccagacagctgcatctccgagaagctctttgaggaaatggccgaacgaatggtgactgagggctggaaagatgcaggttacgagtatctgtgtattgacgattgctggatggccccacaacgggattctgagggaagacttcaggctgatccgcagcgcttccctcatggcataaggcagctggcaaacttggtccacagtaaggggctcaaattgggaatctacgcggacgtgggcaataagacctgtgccggttttccgggatcattcgggtattatgacattgacgcccaaacgtttgctgattggggcgttgacctgctgaaattcgatggttgctactgtgacagcctcgaaaacctggcagacggctacaagcatatgtctctcgccctgaatagaaccggtcggccaatcgtatattcctgcgagtggcctctttacatgtggccatttcagaaaccgaactacacagaaattcgccagtattgcaatcattggaggaacttcgctgatatcgatgactcatgggcctccataaagagcatcttggactggaccagtcggaatcaggagcgaattgtggatgtcgcaggccctggaggatggaacgatccagacatgctggtgatcggcaattttggcctctcttgggaccagcaggttacccaaatggctctgtgggcaattatggccggtcctcttttcatgagcaacgatctgcgcgcgatctcaccacaggcaaaggccctgctccaagacaaagatgtgatagccatcaatcaggacccgttgggaaagcagggctaccagctgagaaaaggcgacaactttgaggtctgggaaaggcctttgagtggagatgcgtgggctgtggccattattaatcggcaagagatcggaggtccacgctcctatacaattcctgtagcatctcttggcaagggcgttgcctgtaacccagcttgcttcatcactcagcttctgccggtgaagagaaaactgggtttctacgaagctaccagcaggctccgatcccacatcaaccctacaggaaccgtcctcttgcagctggagaatacgatgcagacttcactgaaggacctcctg

SEQ ID NO: 1352 - protein, 398 aa, Artificial Sequence
  variant of human alpha-galactosidase A
LDNGLARTPPMGWLHWERFMCNLDCQEEPDSCISEKLFEEMAERMVTEGWKDAGYEYLCIDDCWMAPQRDSEGRLQADPQRFPHGIRQLANLVHSKGLKLGIYADVGNKTCAGFPGSFGYYDIDAQTFADWGVDLLKFDGCYCDSLENLADGYKHMSLALNRTGRPIVYSCEWPLYMWPFQKPNYTEIRQYCNHWRNFADIDDSWASIKSILDWTSRNQERIVDVAGPGGWNDPDMLVIGNFGLSWDQQVTQMALWAIMAGPLFMSNDLRAISPQAKALLQDKDVIAINQDPLGKQGYQLRKGDNFEVWERPLSGDAWAVAIINRQEIGGPRSYTIPVASLGKGVACNPACFITQLLPVKRKLGFYEATSRLRSHINPTGTVLLQLENTMQTSLKDLL

SEQ ID NO: 1353 - DNA, 1194 bp, Artificial Sequence
  variant of human alpha-galactosidase A
ctggataatggattggctagaacacctcctatggggtggcttcactgggagaggttcatgtgcaacctggactgtcaggaagaaccagacagctgcatctccgagaagctctttgaggaaatggccgaacgaatggtgactgagggctggaaagatgcaggttacgagtatctgtgtattgacgattgctggatggccccacaacgggattctgagggaagacttcaggctgatccgcagcgcttccctcatggcataaggcagctggcaaacatggtccacagtaaggggctcaaattgggaatctacgcggacgtgggcaataagacctgtgccggttttccgggatcattcgggtattatgacattgacgcccaaacgtttgctgattggggcgttgacctgctgaaattcgatggttgctactgtgacagcctcgaaaacctggcagacggctacaagcatatgtctctcgccctgaatagaaccggtcggccaatcgtatattcctgcgagtggcctctttacatgtggccatttcagaaaccgaactacacagaaattcgccagtattgcaatcattggaggaacttcgctgatatcgatgactcatgggcctccataaagagcatcttggactggaccagtcggaatcaggagcgaattgtggatgtcgcaggccctggaggatggaacgatccagacatgctggtgatcggcaattttggcctctcttgggaccagcaggttacccaaatggctctgtgggcaattatggccggtcctcttttcatgagcaacgatctgcgcgcgatctcaccacaggcaaaggccctgctccaagacaaagatgtgatagccatcaatcaggacccgttgggaaagcagggctaccagctgagaaaaggcgacaactttgaggtctgggaaaggcctttgagtggagatgcgtgggctgtggccattattaatcggcaagagatcggaggtccacgctcctatacaattcctgtagcatctcttggcaagggcgttgcctgtaacccagcttgcttcatcactcagcttctgccggtgaagagaaaactgggtttctacgaagctaccagcaggctccgatcccacatcaaccctacaggaaccgtcctcttgcagctggagaatacgatgcagacttcactgaaggacctcctg

SEQ ID NO: 1354 - protein, 398 aa, Artificial Sequence
  variant of human alpha-galactosidase A
LDNGLARTPPMGWLHWERFMCNLDCQEEPDSCISEKLFEEMAERMVTEGWKDAGYEYLCIDDCWMAPQRDSEGRLQADPQRFPHGIRQLANMVHSKGLKLGIYADVGNKTCAGFPGSFGYYDIDAQTFADWGVDLLKFDGCYCDSLENLADGYKHMSLALNRTGRPIVYSCEWPLYMWPFQKPNYTEIRQYCNHWRNFADIDDSWASIKSILDWTSRNQERIVDVAGPGGWNDPDMLVIGNFGLSWDQQVTQMALWAIMAGPLFMSNDLRAISPQAKALLQDKDVIAINQDPLGKQGYQLRKGDNFEVWERPLSGDAWAVAIINRQEIGGPRSYTIPVASLGKGVACNPACFITQLLPVKRKLGFYEATSRLRSHINPTGTVLLQLENTMQTSLKDLL

SEQ ID NO: 1355 - DNA, 1194 bp, Artificial Sequence
  variant of human alpha-galactosidase A
ctggataatggattggctagaacacctcctatggggtggcttcactgggagaggttcatgtgcaacctggactgtcaggaagaaccagacagctgcatctccgagaagctctttgaggaaatggccgaacgaatggtgactgagggctggaaagatgcaggttacgagtatctgtgtattgacgattgctggatggccccacaacgggattctgagggaagacttcaggctgatccgcagcgcttccctcatggcataaggcagctggcaaacaatgtccacagtaaggggctcaaattgggaatctacgcggacgtgggcaataagacctgtgccggttttccgggatcattcgggtattatgacattgacgcccaaacgtttgctgattggggcgttgacctgctgaaattcgatggttgctactgtgacagcctcgaaaacctggcagacggctacaagcatatgtctctcgccctgaatagaaccggtcggccaatcgtatattcctgcgagtggcctctttacatgtggccatttcagaaaccgaactacacagaaattcgccagtattgcaatcattggaggaacttcgctgatatcgatgactcatgggcctccataaagagcatcttggactggaccagtcggaatcaggagcgaattgtggatgtcgcaggccctggaggatggaacgatccagacatgctggtgatcggcaattttggcctctcttgggaccagcaggttacccaaatggctctgtgggcaattatggccggtcctcttttcatgagcaacgatctgcgcgcgatctcaccacaggcaaaggccctgctccaagacaaagatgtgatagccatcaatcaggacccgttgggaaagcagggctaccagctgagaaaaggcgacaactttgaggtctgggaaaggcctttgagtggagatgcgtgggctgtggccattattaatcggcaagagatcggaggtccacgctcctatacaattcctgtagcatctcttggcaagggcgttgcctgtaacccagcttgcttcatcactcagcttctgccggtgaagagaaaactgggtttctacgaagctaccagcaggctccgatcccacatcaaccctacaggaaccgtcctcttgcagctggagaatacgatgcagacttcactgaaggacctcctg

SEQ ID NO: 1356 - protein, 398 aa, Artificial Sequence
  variant of human alpha-galactosidase A
LDNGLARTPPMGWLHWERFMCNLDCQEEPDSCISEKLFEEMAERMVTEGWKDAGYEYLCIDDCWMAPQRDSEGRLQADPQRFPHGIRQLANNVHSKGLKLGIYADVGNKTCAGFPGSFGYYDIDAQTFADWGVDLLKFDGCYCDSLENLADGYKHMSLALNRTGRPIVYSCEWPLYMWPFQKPNYTEIRQYCNHWRNFADIDDSWASIKSILDWTSRNQERIVDVAGPGGWNDPDMLVIGNFGLSWDQQVTQMALWAIMAGPLFMSNDLRAISPQAKALLQDKDVIAINQDPLGKQGYQLRKGDNFEVWERPLSGDAWAVAIINRQEIGGPRSYTIPVASLGKGVACNPACFITQLLPVKRKLGFYEATSRLRSHINPTGTVLLQLENTMQTSLKDLL

SEQ ID NO: 1357 - DNA, 1194 bp, Artificial Sequence
  variant of human alpha-galactosidase A
ctggataatggattggctagaacacctcctatggggtggcttcactgggagaggttcatgtgcaacctggactgtcaggaagaaccagacagctgcatctccgagaagctctttgaggaaatggccgaacgaatggtgactgagggctggaaagatgcaggttacgagtatctgtgtattgacgattgctggatggccccacaacgggattctgagggaagacttcaggctgatccgcagcgcttccctcatggcataaggcagctggcaaacccggtccacagtaaggggctcaaattgggaatctacgcggacgtgggcaataagacctgtgccggttttccgggatcattcgggtattatgacattgacgcccaaacgtttgctgattggggcgttgacctgctgaaattcgatggttgctactgtgacagcctcgaaaacctggcagacggctacaagcatatgtctctcgccctgaatagaaccggtcggccaatcgtatattcctgcgagtggcctctttacatgtggccatttcagaaaccgaactacacagaaattcgccagtattgcaatcattggaggaacttcgctgatatcgatgactcatgggcctccataaagagcatcttggactggaccagtcggaatcaggagcgaattgtggatgtcgcaggccctggaggatggaacgatccagacatgctggtgatcggcaattttggcctctcttgggaccagcaggttacccaaatggctctgtgggcaattatggccggtcctcttttcatgagcaacgatctgcgcgcgatctcaccacaggcaaaggccctgctccaagacaaagatgtgatagccatcaatcaggacccgttgggaaagcagggctaccagctgagaaaaggcgacaactttgaggtctgggaaaggcctttgagtggagatgcgtgggctgtggccattattaatcggcaagagatcggaggtccacgctcctatacaattcctgtagcatctcttggcaagggcgttgcctgtaacccagcttgcttcatcactcagcttctgccggtgaagagaaaactgggtttctacgaagctaccagcaggctccgatcccacatcaaccctacaggaaccgtcctcttgcagctggagaatacgatgcagacttcactgaaggacctcctg

SEQ ID NO: 1358 - protein, 398 aa, Artificial Sequence
  variant of human alpha-galactosidase A
LDNGLARTPPMGWLHWERFMCNLDCQEEPDSCISEKLFEEMAERMVTEGWKDAGYEYLCIDDCWMAPQRDSEGRLQADPQRFPHGIRQLANPVHSKGLKLGIYADVGNKTCAGFPGSFGYYDIDAQTFADWGVDLLKFDGCYCDSLENLADGYKHMSLALNRTGRPIVYSCEWPLYMWPFQKPNYTEIRQYCNHWRNFADIDDSWASIKSILDWTSRNQERIVDVAGPGGWNDPDMLVIGNFGLSWDQQVTQMALWAIMAGPLFMSNDLRAISPQAKALLQDKDVIAINQDPLGKQGYQLRKGDNFEVWERPLSGDAWAVAIINRQEIGGPRSYTIPVASLGKGVACNPACFITQLLPVKRKLGFYEATSRLRSHINPTGTVLLQLENTMQTSLKDLL

SEQ ID NO: 1359 - DNA, 1194 bp, Artificial Sequence
  variant of human alpha-galactosidase A
ctggataatggattggctagaacacctcctatggggtggcttcactgggagaggttcatgtgcaacctggactgtcaggaagaaccagacagctgcatctccgagaagctctttgaggaaatggccgaacgaatggtgactgagggctggaaagatgcaggttacgagtatctgtgtattgacgattgctggatggccccacaacgggattctgagggaagacttcaggctgatccgcagcgcttccctcatggcataaggcagctggcaaaccaggtccacagtaaggggctcaaattgggaatctacgcggacgtgggcaataagacctgtgccggttttccgggatcattcgggtattatgacattgacgcccaaacgtttgctgattggggcgttgacctgctgaaattcgatggttgctactgtgacagcctcgaaaacctggcagacggctacaagcatatgtctctcgccctgaatagaaccggtcggccaatcgtatattcctgcgagtggcctctttacatgtggccatttcagaaaccgaactacacagaaattcgccagtattgcaatcattggaggaacttcgctgatatcgatgactcatgggcctccataaagagcatcttggactggaccagtcggaatcaggagcgaattgtggatgtcgcaggccctggaggatggaacgatccagacatgctggtgatcggcaattttggcctctcttgggaccagcaggttacccaaatggctctgtgggcaattatggccggtcctcttttcatgagcaacgatctgcgcgcgatctcaccacaggcaaaggccctgctccaagacaaagatgtgatagccatcaatcaggacccgttgggaaagcagggctaccagctgagaaaaggcgacaactttgaggtctgggaaaggcctttgagtggagatgcgtgggctgtggccattattaatcggcaagagatcggaggtccacgctcctatacaattcctgtagcatctcttggcaagggcgttgcctgtaacccagcttgcttcatcactcagcttctgccggtgaagagaaaactgggtttctacgaagctaccagcaggctccgatcccacatcaaccctacaggaaccgtcctcttgcagctggagaatacgatgcagacttcactgaaggacctcctg

SEQ ID NO: 1360 - protein, 398 aa, Artificial Sequence
  variant of human alpha-galactosidase A
LDNGLARTPPMGWLHWERFMCNLDCQEEPDSCISEKLFEEMAERMVTEGWKDAGYEYLCIDDCWMAPQRDSEGRLQADPQRFPHGIRQLANQVHSKGLKLGIYADVGNKTCAGFPGSFGYYDIDAQTFADWGVDLLKFDGCYCDSLENLADGYKHMSLALNRTGRPIVYSCEWPLYMWPFQKPNYTEIRQYCNHWRNFADIDDSWASIKSILDWTSRNQERIVDVAGPGGWNDPDMLVIGNFGLSWDQQVTQMALWAIMAGPLFMSNDLRAISPQAKALLQDKDVIAINQDPLGKQGYQLRKGDNFEVWERPLSGDAWAVAIINRQEIGGPRSYTIPVASLGKGVACNPACFITQLLPVKRKLGFYEATSRLRSHINPTGTVLLQLENTMQTSLKDLL

SEQ ID NO: 1361 - DNA, 1194 bp, Artificial Sequence
  variant of human alpha-galactosidase A
ctggataatggattggctagaacacctcctatggggtggcttcactgggagaggttcatgtgcaacctggactgtcaggaagaaccagacagctgcatctccgagaagctctttgaggaaatggccgaacgaatggtgactgagggctggaaagatgcaggttacgagtatctgtgtattgacgattgctggatggccccacaacgggattctgagggaagacttcaggctgatccgcagcgcttccctcatggcataaggcagctggcaaaccgtgtccacagtaaggggctcaaattgggaatctacgcggacgtgggcaataagacctgtgccggttttccgggatcattcgggtattatgacattgacgcccaaacgtttgctgattggggcgttgacctgctgaaattcgatggttgctactgtgacagcctcgaaaacctggcagacggctacaagcatatgtctctcgccctgaatagaaccggtcggccaatcgtatattcctgcgagtggcctctttacatgtggccatttcagaaaccgaactacacagaaattcgccagtattgcaatcattggaggaacttcgctgatatcgatgactcatgggcctccataaagagcatcttggactggaccagtcggaatcaggagcgaattgtggatgtcgcaggccctggaggatggaacgatccagacatgctggtgatcggcaattttggcctctcttgggaccagcaggttacccaaatggctctgtgggcaattatggccggtcctcttttcatgagcaacgatctgcgcgcgatctcaccacaggcaaaggccctgctccaagacaaagatgtgatagccatcaatcaggacccgttgggaaagcagggctaccagctgagaaaaggcgacaactttgaggtctgggaaaggcctttgagtggagatgcgtgggctgtggccattattaatcggcaagagatcggaggtccacgctcctatacaattcctgtagcatctcttggcaagggcgttgcctgtaacccagcttgcttcatcactcagcttctgccggtgaagagaaaactgggtttctacgaagctaccagcaggctccgatcccacatcaaccctacaggaaccgtcctcttgcagctggagaatacgatgcagacttcactgaaggacctcctg

SEQ ID NO: 1362 - protein, 398 aa, Artificial Sequence
  variant of human alpha-galactosidase A
LDNGLARTPPMGWLHWERFMCNLDCQEEPDSCISEKLFEEMAERMVTEGWKDAGYEYLCIDDCWMAPQRDSEGRLQADPQRFPHGIRQLANRVHSKGLKLGIYADVGNKTCAGFPGSFGYYDIDAQTFADWGVDLLKFDGCYCDSLENLADGYKHMSLALNRTGRPIVYSCEWPLYMWPFQKPNYTEIRQYCNHWRNFADIDDSWASIKSILDWTSRNQERIVDVAGPGGWNDPDMLVIGNFGLSWDQQVTQMALWAIMAGPLFMSNDLRAISPQAKALLQDKDVIAINQDPLGKQGYQLRKGDNFEVWERPLSGDAWAVAIINRQEIGGPRSYTIPVASLGKGVACNPACFITQLLPVKRKLGFYEATSRLRSHINPTGTVLLQLENTMQTSLKDLL

SEQ ID NO: 1363 - DNA, 1194 bp, Artificial Sequence
  variant of human alpha-galactosidase A
ctggataatggattggctagaacacctcctatggggtggcttcactgggagaggttcatgtgcaacctggactgtcaggaagaaccagacagctgcatctccgagaagctctttgaggaaatggccgaacgaatggtgactgagggctggaaagatgcaggttacgagtatctgtgtattgacgattgctggatggccccacaacgggattctgagggaagacttcaggctgatccgcagcgcttccctcatggcataaggcagctggcaaactcggtccacagtaaggggctcaaattgggaatctacgcggacgtgggcaataagacctgtgccggttttccgggatcattcgggtattatgacattgacgcccaaacgtttgctgattggggcgttgacctgctgaaattcgatggttgctactgtgacagcctcgaaaacctggcagacggctacaagcatatgtctctcgccctgaatagaaccggtcggccaatcgtatattcctgcgagtggcctctttacatgtggccatttcagaaaccgaactacacagaaattcgccagtattgcaatcattggaggaacttcgctgatatcgatgactcatgggcctccataaagagcatcttggactggaccagtcggaatcaggagcgaattgtggatgtcgcaggccctggaggatggaacgatccagacatgctggtgatcggcaattttggcctctcttgggaccagcaggttacccaaatggctctgtgggcaattatggccggtcctcttttcatgagcaacgatctgcgcgcgatctcaccacaggcaaaggccctgctccaagacaaagatgtgatagccatcaatcaggacccgttgggaaagcagggctaccagctgagaaaaggcgacaactttgaggtctgggaaaggcctttgagtggagatgcgtgggctgtggccattattaatcggcaagagatcggaggtccacgctcctatacaattcctgtagcatctcttggcaagggcgttgcctgtaacccagcttgcttcatcactcagcttctgccggtgaagagaaaactgggtttctacgaagctaccagcaggctccgatcccacatcaaccctacaggaaccgtcctcttgcagctggagaatacgatgcagacttcactgaaggacctcctg

SEQ ID NO: 1364 - protein, 398 aa, Artificial Sequence
  variant of human alpha-galactosidase A
LDNGLARTPPMGWLHWERFMCNLDCQEEPDSCISEKLFEEMAERMVTEGWKDAGYEYLCIDDCWMAPQRDSEGRLQADPQRFPHGIRQLANSVHSKGLKLGIYADVGNKTCAGFPGSFGYYDIDAQTFADWGVDLLKFDGCYCDSLENLADGYKHMSLALNRTGRPIVYSCEWPLYMWPFQKPNYTEIRQYCNHWRNFADIDDSWASIKSILDWTSRNQERIVDVAGPGGWNDPDMLVIGNFGLSWDQQVTQMALWAIMAGPLFMSNDLRAISPQAKALLQDKDVIAINQDPLGKQGYQLRKGDNFEVWERPLSGDAWAVAIINRQEIGGPRSYTIPVASLGKGVACNPACFITQLLPVKRKLGFYEATSRLRSHINPTGTVLLQLENTMQTSLKDLL

SEQ ID NO: 1365 - DNA, 1194 bp, Artificial Sequence
  variant of human alpha-galactosidase A
ctggataatggattggctagaacacctcctatggggtggcttcactgggagaggttcatgtgcaacctggactgtcaggaagaaccagacagctgcatctccgagaagctctttgaggaaatggccgaacgaatggtgactgagggctggaaagatgcaggttacgagtatctgtgtattgacgattgctggatggccccacaacgggattctgagggaagacttcaggctgatccgcagcgcttccctcatggcataaggcagctggcaaacactgtccacagtaaggggctcaaattgggaatctacgcggacgtgggcaataagacctgtgccggttttccgggatcattcgggtattatgacattgacgcccaaacgtttgctgattggggcgttgacctgctgaaattcgatggttgctactgtgacagcctcgaaaacctggcagacggctacaagcatatgtctctcgccctgaatagaaccggtcggccaatcgtatattcctgcgagtggcctctttacatgtggccatttcagaaaccgaactacacagaaattcgccagtattgcaatcattggaggaacttcgctgatatcgatgactcatgggcctccataaagagcatcttggactggaccagtcggaatcaggagcgaattgtggatgtcgcaggccctggaggatggaacgatccagacatgctggtgatcggcaattttggcctctcttgggaccagcaggttacccaaatggctctgtgggcaattatggccggtcctcttttcatgagcaacgatctgcgcgcgatctcaccacaggcaaaggccctgctccaagacaaagatgtgatagccatcaatcaggacccgttgggaaagcagggctaccagctgagaaaaggcgacaactttgaggtctgggaaaggcctttgagtggagatgcgtgggctgtggccattattaatcggcaagagatcggaggtccacgctcctatacaattcctgtagcatctcttggcaagggcgttgcctgtaacccagcttgcttcatcactcagcttctgccggtgaagagaaaactgggtttctacgaagctaccagcaggctccgatcccacatcaaccctacaggaaccgtcctcttgcagctggagaatacgatgcagacttcactgaaggacctcctg

SEQ ID NO: 1366 - protein, 398 aa, Artificial Sequence; identical to SEQ ID NO: 246
  variant of human alpha-galactosidase A

SEQ ID NO: 1367 - DNA, 1194 bp, Artificial Sequence
  variant of human alpha-galactosidase A
ctggataatggattggctagaacacctcctatggggtggcttcactgggagaggttcatgtgcaacctggactgtcaggaagaaccagacagctgcatctccgagaagctctttgaggaaatggccgaacgaatggtgactgagggctggaaagatgcaggttacgagtatctgtgtattgacgattgctggatggccccacaacgggattctgagggaagacttcaggctgatccgcagcgcttccctcatggcataaggcagctggcaaacgttgtccacagtaaggggctcaaattgggaatctacgcggacgtgggcaataagacctgtgccggttttccgggatcattcgggtattatgacattgacgcccaaacgtttgctgattggggcgttgacctgctgaaattcgatggttgctactgtgacagcctcgaaaacctggcagacggctacaagcatatgtctctcgccctgaatagaaccggtcggccaatcgtatattcctgcgagtggcctctttacatgtggccatttcagaaaccgaactacacagaaattcgccagtattgcaatcattggaggaacttcgctgatatcgatgactcatgggcctccataaagagcatcttggactggaccagtcggaatcaggagcgaattgtggatgtcgcaggccctggaggatggaacgatccagacatgctggtgatcggcaattttggcctctcttgggaccagcaggttacccaaatggctctgtgggcaattatggccggtcctcttttcatgagcaacgatctgcgcgcgatctcaccacaggcaaaggccctgctccaagacaaagatgtgatagccatcaatcaggacccgttgggaaagcagggctaccagctgagaaaaggcgacaactttgaggtctgggaaaggcctttgagtggagatgcgtgggctgtggccattattaatcggcaagagatcggaggtccacgctcctatacaattcctgtagcatctcttggcaagggcgttgcctgtaacccagcttgcttcatcactcagcttctgccggtgaagagaaaactgggtttctacgaagctaccagcaggctccgatcccacatcaaccctacaggaaccgtcctcttgcagctggagaatacgatgcagacttcactgaaggacctcctg

SEQ ID NO: 1368 - protein, 398 aa, Artificial Sequence
  variant of human alpha-galactosidase A
LDNGLARTPPMGWLHWERFMCNLDCQEEPDSCISEKLFEEMAERMVTEGWKDAGYEYLCIDDCWMAPQRDSEGRLQADPQRFPHGIRQLANVVHSKGLKLGIYADVGNKTCAGFPGSFGYYDIDAQTFADWGVDLLKFDGCYCDSLENLADGYKHMSLALNRTGRPIVYSCEWPLYMWPFQKPNYTEIRQYCNHWRNFADIDDSWASIKSILDWTSRNQERIVDVAGPGGWNDPDMLVIGNFGLSWDQQVTQMALWAIMAGPLFMSNDLRAISPQAKALLQDKDVIAINQDPLGKQGYQLRKGDNFEVWERPLSGDAWAVAIINRQEIGGPRSYTIPVASLGKGVACNPACFITQLLPVKRKLGFYEATSRLRSHINPTGTVLLQLENTMQTSLKDLL

SEQ ID NO: 1369 - DNA, 1194 bp, Artificial Sequence
  variant of human alpha-galactosidase A
ctggataatggattggctagaacacctcctatggggtggcttcactgggagaggttcatgtgcaacctggactgtcaggaagaaccagacagctgcatctccgagaagctctttgaggaaatggccgaacgaatggtgactgagggctggaaagatgcaggttacgagtatctgtgtattgacgattgctggatggccccacaacgggattctgagggaagacttcaggctgatccgcagcgcttccctcatggcataaggcagctggcaaactgggtccacagtaaggggctcaaattgggaatctacgcggacgtgggcaataagacctgtgccggttttccgggatcattcgggtattatgacattgacgcccaaacgtttgctgattggggcgttgacctgctgaaattcgatggttgctactgtgacagcctcgaaaacctggcagacggctacaagcatatgtctctcgccctgaatagaaccggtcggccaatcgtatattcctgcgagtggcctctttacatgtggccatttcagaaaccgaactacacagaaattcgccagtattgcaatcattggaggaacttcgctgatatcgatgactcatgggcctccataaagagcatcttggactggaccagtcggaatcaggagcgaattgtggatgtcgcaggccctggaggatggaacgatccagacatgctggtgatcggcaattttggcctctcttgggaccagcaggttacccaaatggctctgtgggcaattatggccggtcctcttttcatgagcaacgatctgcgcgcgatctcaccacaggcaaaggccctgctccaagacaaagatgtgatagccatcaatcaggacccgttgggaaagcagggctaccagctgagaaaaggcgacaactttgaggtctgggaaaggcctttgagtggagatgcgtgggctgtggccattattaatcggcaagagatcggaggtccacgctcctatacaattcctgtagcatctcttggcaagggcgttgcctgtaacccagcttgcttcatcactcagcttctgccggtgaagagaaaactgggtttctacgaagctaccagcaggctccgatcccacatcaaccctacaggaaccgtcctcttgcagctggagaatacgatgcagacttcactgaaggacctcctg

SEQ ID NO: 1370 - protein, 398 aa, Artificial Sequence
  variant of human alpha-galactosidase A
LDNGLARTPPMGWLHWERFMCNLDCQEEPDSCISEKLFEEMAERMVTEGWKDAGYEYLCIDDCWMAPQRDSEGRLQADPQRFPHGIRQLANWVHSKGLKLGIYADVGNKTCAGFPGSFGYYDIDAQTFADWGVDLLKFDGCYCDSLENLADGYKHMSLALNRTGRPIVYSCEWPLYMWPFQKPNYTEIRQYCNHWRNFADIDDSWASIKSILDWTSRNQERIVDVAGPGGWNDPDMLVIGNFGLSWDQQVTQMALWAIMAGPLFMSNDLRAISPQAKALLQDKDVIAINQDPLGKQGYQLRKGDNFEVWERPLSGDAWAVAIINRQEIGGPRSYTIPVASLGKGVACNPACFITQLLPVKRKLGFYEATSRLRSHINPTGTVLLQLENTMQTSLKDLL

SEQ ID NO: 1371 - DNA, 1194 bp, Artificial Sequence
  variant of human alpha-galactosidase A
ctggataatggattggctagaacacctcctatggggtggcttcactgggagaggttcatgtgcaacctggactgtcaggaagaaccagacagctgcatctccgagaagctctttgaggaaatggccgaacgaatggtgactgagggctggaaagatgcaggttacgagtatctgtgtattgacgattgctggatggccccacaacgggattctgagggaagacttcaggctgatccgcagcgcttccctcatggcataaggcagctggcaaactacgtccacagtaaggggctcaaattgggaatctacgcggacgtgggcaataagacctgtgccggttttccgggatcattcgggtattatgacattgacgcccaaacgtttgctgattggggcgttgacctgctgaaattcgatggttgctactgtgacagcctcgaaaacctggcagacggctacaagcatatgtctctcgccctgaatagaaccggtcggccaatcgtatattcctgcgagtggcctctttacatgtggccatttcagaaaccgaactacacagaaattcgccagtattgcaatcattggaggaacttcgctgatatcgatgactcatgggcctccataaagagcatcttggactggaccagtcggaatcaggagcgaattgtggatgtcgcaggccctggaggatggaacgatccagacatgctggtgatcggcaattttggcctctcttgggaccagcaggttacccaaatggctctgtgggcaattatggccggtcctcttttcatgagcaacgatctgcgcgcgatctcaccacaggcaaaggccctgctccaagacaaagatgtgatagccatcaatcaggacccgttgggaaagcagggctaccagctgagaaaaggcgacaactttgaggtctgggaaaggcctttgagtggagatgcgtgggctgtggccattattaatcggcaagagatcggaggtccacgctcctatacaattcctgtagcatctcttggcaagggcgttgcctgtaacccagcttgcttcatcactcagcttctgccggtgaagagaaaactgggtttctacgaagctaccagcaggctccgatcccacatcaaccctacaggaaccgtcctcttgcagctggagaatacgatgcagacttcactgaaggacctcctg

SEQ ID NO: 1372 - protein, 398 aa, Artificial Sequence
  variant of human alpha-galactosidase A
LDNGLARTPPMGWLHWERFMCNLDCQEEPDSCISEKLFEEMAERMVTEGWKDAGYEYLCIDDCWMAPQRDSEGRLQADPQRFPHGIRQLANYVHSKGLKLGIYADVGNKTCAGFPGSFGYYDIDAQTFADWGVDLLKFDGCYCDSLENLADGYKHMSLALNRTGRPIVYSCEWPLYMWPFQKPNYTEIRQYCNHWRNFADIDDSWASIKSILDWTSRNQERIVDVAGPGGWNDPDMLVIGNFGLSWDQQVTQMALWAIMAGPLFMSNDLRAISPQAKALLQDKDVIAINQDPLGKQGYQLRKGDNFEVWERPLSGDAWAVAIINRQEIGGPRSYTIPVASLGKGVACNPACFITQLLPVKRKLGFYEATSRLRSHINPTGTVLLQLENTMQTSLKDLL

SEQ ID NO: 1373 - DNA, 1194 bp, Artificial Sequence
  variant of human alpha-galactosidase A
ctggataatggattggctagaacacctcctatggggtggcttcactgggagaggttcatgtgcaacctggactgtcaggaagaaccagacagctgcatctccgagaagctctttgaggaaatggccgaacgaatggtgactgagggctggaaagatgcaggttacgagtatctgtgtattgacgattgctggatggccccacaacgggattctgagggaagacttcaggctgatccgcagcgcttccctcatggcataaggcagctggcaaaccacgtccacagtaaggggctcaaattgggaatctacgcggacgtgggcaataagacctgtgccggttttccgggatcattcgggtattatgacattgacgcccaaacgtttgctgattggggcgttgacctgctgaaattcgatggttgctactgtgacagcctcgaaaacctggcagacggctacaagcatatgtctctcgccctgaatagaaccggtcggccaatcgtatattcctgcgagtggcctctttacatgtggccatttcagaaaccgaactacacagaaattcgccagtattgcaatcattggaggaacttcgctgatatcgatgactcatgggcctccataaagagcatcttggactggaccagtcggaatcaggagcgaattgtggatgtcgcaggccctggaggatggaacgatccagacatgctggtgatcggcaattttggcctctcttgggaccagcaggttacccaaatggctctgtgggcaattatggccggtcctcttttcatgagcaacgatctgcgcgcgatctcaccacaggcaaaggccctgctccaagacaaagatgtgatagccatcaatcaggacccgttgggaaagcagggctaccagctgagaaaaggcgacaactttgaggtctgggaaaggcctttgagtggagatgcgtgggctgtggccgcgattaatcggcaagagatcggaggtccacgctcctatacaattcctgtagcatctcttggcaagggcgttgcctgtaacccagcttgcttcatcactcagcttctgccggtgaagagaaaactgggtttctacgaagctaccagcaggctccgatcccacatcaaccctacaggaaccgtcctcttgcagctggagaatacgatgcagacttcactgaaggacctcctg

SEQ ID NO: 1374 - protein, 398 aa, Artificial Sequence
  variant of human alpha-galactosidase A
LDNGLARTPPMGWLHWERFMCNLDCQEEPDSCISEKLFEEMAERMVTEGWKDAGYEYLCIDDCWMAPQRDSEGRLQADPQRFPHGIRQLANHVHSKGLKLGIYADVGNKTCAGFPGSFGYYDIDAQTFADWGVDLLKFDGCYCDSLENLADGYKHMSLALNRTGRPIVYSCEWPLYMWPFQKPNYTEIRQYCNHWRNFADIDDSWASIKSILDWTSRNQERIVDVAGPGGWNDPDMLVIGNFGLSWDQQVTQMALWAIMAGPLFMSNDLRAISPQAKALLQDKDVIAINQDPLGKQGYQLRKGDNFEVWERPLSGDAWAVAAINRQEIGGPRSYTIPVASLGKGVACNPACFITQLLPVKRKLGFYEATSRLRSHINPTGTVLLQLENTMQTSLKDLL

SEQ ID NO: 1375 - DNA, 1194 bp, Artificial Sequence
  variant of human alpha-galactosidase A
ctggataatggattggctagaacacctcctatggggtggcttcactgggagaggttcatgtgcaacctggactgtcaggaagaaccagacagctgcatctccgagaagctctttgaggaaatggccgaacgaatggtgactgagggctggaaagatgcaggttacgagtatctgtgtattgacgattgctggatggccccacaacgggattctgagggaagacttcaggctgatccgcagcgcttccctcatggcataaggcagctggcaaaccacgtccacagtaaggggctcaaattgggaatctacgcggacgtgggcaataagacctgtgccggttttccgggatcattcgggtattatgacattgacgcccaaacgtttgctgattggggcgttgacctgctgaaattcgatggttgctactgtgacagcctcgaaaacctggcagacggctacaagcatatgtctctcgccctgaatagaaccggtcggccaatcgtatattcctgcgagtggcctctttacatgtggccatttcagaaaccgaactacacagaaattcgccagtattgcaatcattggaggaacttcgctgatatcgatgactcatgggcctccataaagagcatcttggactggaccagtcggaatcaggagcgaattgtggatgtcgcaggccctggaggatggaacgatccagacatgctggtgatcggcaattttggcctctcttgggaccagcaggttacccaaatggctctgtgggcaattatggccggtcctcttttcatgagcaacgatctgcgcgcgatctcaccacaggcaaaggccctgctccaagacaaagatgtgatagccatcaatcaggacccgttgggaaagcagggctaccagctgagaaaaggcgacaactttgaggtctgggaaaggcctttgagtggagatgcgtgggctgtggcctgtattaatcggcaagagatcggaggtccacgctcctatacaattcctgtagcatctcttggcaagggcgttgcctgtaacccagcttgcttcatcactcagcttctgccggtgaagagaaaactgggtttctacgaagctaccagcaggctccgatcccacatcaaccctacaggaaccgtcctcttgcagctggagaatacgatgcagacttcactgaaggacctcctg

SEQ ID NO: 1376 - protein, 398 aa, Artificial Sequence
  variant of human alpha-galactosidase A
LDNGLARTPPMGWLHWERFMCNLDCQEEPDSCISEKLFEEMAERMVTEGWKDAGYEYLCIDDCWMAPQRDSEGRLQADPQRFPHGIRQLANHVHSKGLKLGIYADVGNKTCAGFPGSFGYYDIDAQTFADWGVDLLKFDGCYCDSLENLADGYKHMSLALNRTGRPIVYSCEWPLYMWPFQKPNYTEIRQYCNHWRNFADIDDSWASIKSILDWTSRNQERIVDVAGPGGWNDPDMLVIGNFGLSWDQQVTQMALWAIMAGPLFMSNDLRAISPQAKALLQDKDVIAINQDPLGKQGYQLRKGDNFEVWERPLSGDAWAVACINRQEIGGPRSYTIPVASLGKGVACNPACFITQLLPVKRKLGFYEATSRLRSHINPTGTVLLQLENTMQTSLKDLL

SEQ ID NO: 1377 - DNA, 1194 bp, Artificial Sequence
  variant of human alpha-galactosidase A
ctggataatggattggctagaacacctcctatggggtggcttcactgggagaggttcatgtgcaacctggactgtcaggaagaaccagacagctgcatctccgagaagctctttgaggaaatggccgaacgaatggtgactgagggctggaaagatgcaggttacgagtatctgtgtattgacgattgctggatggccccacaacgggattctgagggaagacttcaggctgatccgcagcgcttccctcatggcataaggcagctggcaaaccacgtccacagtaaggggctcaaattgggaatctacgcggacgtgggcaataagacctgtgccggttttccgggatcattcgggtattatgacattgacgcccaaacgtttgctgattggggcgttgacctgctgaaattcgatggttgctactgtgacagcctcgaaaacctggcagacggctacaagcatatgtctctcgccctgaatagaaccggtcggccaatcgtatattcctgcgagtggcctctttacatgtggccatttcagaaaccgaactacacagaaattcgccagtattgcaatcattggaggaacttcgctgatatcgatgactcatgggcctccataaagagcatcttggactggaccagtcggaatcaggagcgaattgtggatgtcgcaggccctggaggatggaacgatccagacatgctggtgatcggcaattttggcctctcttgggaccagcaggttacccaaatggctctgtgggcaattatggccggtcctcttttcatgagcaacgatctgcgcgcgatctcaccacaggcaaaggccctgctccaagacaaagatgtgatagccatcaatcaggacccgttgggaaagcagggctaccagctgagaaaaggcgacaactttgaggtctgggaaaggcctttgagtggagatgcgtgggctgtggccgatattaatcggcaagagatcggaggtccacgctcctatacaattcctgtagcatctcttggcaagggcgttgcctgtaacccagcttgcttcatcactcagcttctgccggtgaagagaaaactgggtttctacgaagctaccagcaggctccgatcccacatcaaccctacaggaaccgtcctcttgcagctggagaatacgatgcagacttcactgaaggacctcctg

SEQ ID NO: 1378 - protein, 398 aa, Artificial Sequence
  variant of human alpha-galactosidase A
LDNGLARTPPMGWLHWERFMCNLDCQEEPDSCISEKLFEEMAERMVTEGWKDAGYEYLCIDDCWMAPQRDSEGRLQADPQRFPHGIRQLANHVHSKGLKLGIYADVGNKTCAGFPGSFGYYDIDAQTFADWGVDLLKFDGCYCDSLENLADGYKHMSLALNRTGRPIVYSCEWPLYMWPFQKPNYTEIRQYCNHWRNFADIDDSWASIKSILDWTSRNQERIVDVAGPGGWNDPDMLVIGNFGLSWDQQVTQMALWAIMAGPLFMSNDLRAISPQAKALLQDKDVIAINQDPLGKQGYQLRKGDNFEVWERPLSGDAWAVADINRQEIGGPRSYTIPVASLGKGVACNPACFITQLLPVKRKLGFYEATSRLRSHINPTGTVLLQLENTMQTSLKDLL

SEQ ID NO: 1379 - DNA, 1194 bp, Artificial Sequence
  variant of human alpha-galactosidase A
ctggataatggattggctagaacacctcctatggggtggcttcactgggagaggttcatgtgcaacctggactgtcaggaagaaccagacagctgcatctccgagaagctctttgaggaaatggccgaacgaatggtgactgagggctggaaagatgcaggttacgagtatctgtgtattgacgattgctggatggccccacaacgggattctgagggaagacttcaggctgatccgcagcgcttccctcatggcataaggcagctggcaaaccacgtccacagtaaggggctcaaattgggaatctacgcggacgtgggcaataagacctgtgccggttttccgggatcattcgggtattatgacattgacgcccaaacgtttgctgattggggcgttgacctgctgaaattcgatggttgctactgtgacagcctcgaaaacctggcagacggctacaagcatatgtctctcgccctgaatagaaccggtcggccaatcgtatattcctgcgagtggcctctttacatgtggccatttcagaaaccgaactacacagaaattcgccagtattgcaatcattggaggaacttcgctgatatcgatgactcatgggcctccataaagagcatcttggactggaccagtcggaatcaggagcgaattgtggatgtcgcaggccctggaggatggaacgatccagacatgctggtgatcggcaattttggcctctcttgggaccagcaggttacccaaatggctctgtgggcaattatggccggtcctcttttcatgagcaacgatctgcgcgcgatctcaccacaggcaaaggccctgctccaagacaaagatgtgatagccatcaatcaggacccgttgggaaagcagggctaccagctgagaaaaggcgacaactttgaggtctgggaaaggcctttgagtggagatgcgtgggctgtggccgagattaatcggcaagagatcggaggtccacgctcctatacaattcctgtagcatctcttggcaagggcgttgcctgtaacccagcttgcttcatcactcagcttctgccggtgaagagaaaactgggtttctacgaagctaccagcaggctccgatcccacatcaaccctacaggaaccgtcctcttgcagctggagaatacgatgcagacttcactgaaggacctcctg

SEQ ID NO: 1380 - protein, 398 aa, Artificial Sequence
  variant of human alpha-galactosidase A
LDNGLARTPPMGWLHWERFMCNLDCQEEPDSCISEKLFEEMAERMVTEGWKDAGYEYLCIDDCWMAPQRDSEGRLQADPQRFPHGIRQLANHVHSKGLKLGIYADVGNKTCAGFPGSFGYYDIDAQTFADWGVDLLKFDGCYCDSLENLADGYKHMSLALNRTGRPIVYSCEWPLYMWPFQKPNYTEIRQYCNHWRNFADIDDSWASIKSILDWTSRNQERIVDVAGPGGWNDPDMLVIGNFGLSWDQQVTQMALWAIMAGPLFMSNDLRAISPQAKALLQDKDVIAINQDPLGKQGYQLRKGDNFEVWERPLSGDAWAVAEINRQEIGGPRSYTIPVASLGKGVACNPACFITQLLPVKRKLGFYEATSRLRSHINPTGTVLLQLENTMQTSLKDLL

SEQ ID NO: 1381 - DNA, 1194 bp, Artificial Sequence
  variant of human alpha-galactosidase A
ctggataatggattggctagaacacctcctatggggtggcttcactgggagaggttcatgtgcaacctggactgtcaggaagaaccagacagctgcatctccgagaagctctttgaggaaatggccgaacgaatggtgactgagggctggaaagatgcaggttacgagtatctgtgtattgacgattgctggatggccccacaacgggattctgagggaagacttcaggctgatccgcagcgcttccctcatggcataaggcagctggcaaaccacgtccacagtaaggggctcaaattgggaatctacgcggacgtgggcaataagacctgtgccggttttccgggatcattcgggtattatgacattgacgcccaaacgtttgctgattggggcgttgacctgctgaaattcgatggttgctactgtgacagcctcgaaaacctggcagacggctacaagcatatgtctctcgccctgaatagaaccggtcggccaatcgtatattcctgcgagtggcctctttacatgtggccatttcagaaaccgaactacacagaaattcgccagtattgcaatcattggaggaacttcgctgatatcgatgactcatgggcctccataaagagcatcttggactggaccagtcggaatcaggagcgaattgtggatgtcgcaggccctggaggatggaacgatccagacatgctggtgatcggcaattttggcctctcttgggaccagcaggttacccaaatggctctgtgggcaattatggccggtcctcttttcatgagcaacgatctgcgcgcgatctcaccacaggcaaaggccctgctccaagacaaagatgtgatagccatcaatcaggacccgttgggaaagcagggctaccagctgagaaaaggcgacaactttgaggtctgggaaaggcctttgagtggagatgcgtgggctgtggcctttattaatcggcaagagatcggaggtccacgctcctatacaattcctgtagcatctcttggcaagggcgttgcctgtaacccagcttgcttcatcactcagcttctgccggtgaagagaaaactgggtttctacgaagctaccagcaggctccgatcccacatcaaccctacaggaaccgtcctcttgcagctggagaatacgatgcagacttcactgaaggacctcctg

SEQ ID NO: 1382 - protein, 398 aa, Artificial Sequence
  variant of human alpha-galactosidase A
LDNGLARTPPMGWLHWERFMCNLDCQEEPDSCISEKLFEEMAERMVTEGWKDAGYEYLCIDDCWMAPQRDSEGRLQADPQRFPHGIRQLANHVHSKGLKLGIYADVGNKTCAGFPGSFGYYDIDAQTFADWGVDLLKFDGCYCDSLENLADGYKHMSLALNRTGRPIVYSCEWPLYMWPFQKPNYTEIRQYCNHWRNFADIDDSWASIKSILDWTSRNQERIVDVAGPGGWNDPDMLVIGNFGLSWDQQVTQMALWAIMAGPLFMSNDLRAISPQAKALLQDKDVIAINQDPLGKQGYQLRKGDNFEVWERPLSGDAWAVAFINRQEIGGPRSYTIPVASLGKGVACNPACFITQLLPVKRKLGFYEATSRLRSHINPTGTVLLQLENTMQTSLKDLL

SEQ ID NO: 1383 - DNA, 1194 bp, Artificial Sequence
  variant of human alpha-galactosidase A
ctggataatggattggctagaacacctcctatggggtggcttcactgggagaggttcatgtgcaacctggactgtcaggaagaaccagacagctgcatctccgagaagctctttgaggaaatggccgaacgaatggtgactgagggctggaaagatgcaggttacgagtatctgtgtattgacgattgctggatggccccacaacgggattctgagggaagacttcaggctgatccgcagcgcttccctcatggcataaggcagctggcaaaccacgtccacagtaaggggctcaaattgggaatctacgcggacgtgggcaataagacctgtgccggttttccgggatcattcgggtattatgacattgacgcccaaacgtttgctgattggggcgttgacctgctgaaattcgatggttgctactgtgacagcctcgaaaacctggcagacggctacaagcatatgtctctcgccctgaatagaaccggtcggccaatcgtatattcctgcgagtggcctctttacatgtggccatttcagaaaccgaactacacagaaattcgccagtattgcaatcattggaggaacttcgctgatatcgatgactcatgggcctccataaagagcatcttggactggaccagtcggaatcaggagcgaattgtggatgtcgcaggccctggaggatggaacgatccagacatgctggtgatcggcaattttggcctctcttgggaccagcaggttacccaaatggctctgtgggcaattatggccggtcctcttttcatgagcaacgatctgcgcgcgatctcaccacaggcaaaggccctgctccaagacaaagatgtgatagccatcaatcaggacccgttgggaaagcagggctaccagctgagaaaaggcgacaactttgaggtctgggaaaggcctttgagtggagatgcgtgggctgtggccggtattaatcggcaagagatcggaggtccacgctcctatacaattcctgtagcatctcttggcaagggcgttgcctgtaacccagcttgcttcatcactcagcttctgccggtgaagagaaaactgggtttctacgaagctaccagcaggctccgatcccacatcaaccctacaggaaccgtcctcttgcagctggagaatacgatgcagacttcactgaaggacctcctg

SEQ ID NO: 1384 - protein, 398 aa, Artificial Sequence
  variant of human alpha-galactosidase A
LDNGLARTPPMGWLHWERFMCNLDCQEEPDSCISEKLFEEMAERMVTEGWKDAGYEYLCIDDCWMAPQRDSEGRLQADPQRFPHGIRQLANHVHSKGLKLGIYADVGNKTCAGFPGSFGYYDIDAQTFADWGVDLLKFDGCYCDSLENLADGYKHMSLALNRTGRPIVYSCEWPLYMWPFQKPNYTEIRQYCNHWRNFADIDDSWASIKSILDWTSRNQERIVDVAGPGGWNDPDMLVIGNFGLSWDQQVTQMALWAIMAGPLFMSNDLRAISPQAKALLQDKDVIAINQDPLGKQGYQLRKGDNFEVWERPLSGDAWAVAGINRQEIGGPRSYTIPVASLGKGVACNPACFITQLLPVKRKLGFYEATSRLRSHINPTGTVLLQLENTMQTSLKDLL

SEQ ID NO: 1385 - DNA, 1194 bp, Artificial Sequence
  variant of human alpha-galactosidase A
ctggataatggattggctagaacacctcctatggggtggcttcactgggagaggttcatgtgcaacctggactgtcaggaagaaccagacagctgcatctccgagaagctctttgaggaaatggccgaacgaatggtgactgagggctggaaagatgcaggttacgagtatctgtgtattgacgattgctggatggccccacaacgggattctgagggaagacttcaggctgatccgcagcgcttccctcatggcataaggcagctggcaaaccacgtccacagtaaggggctcaaattgggaatctacgcggacgtgggcaataagacctgtgccggttttccgggatcattcgggtattatgacattgacgcccaaacgtttgctgattggggcgttgacctgctgaaattcgatggttgctactgtgacagcctcgaaaacctggcagacggctacaagcatatgtctctcgccctgaatagaaccggtcggccaatcgtatattcctgcgagtggcctctttacatgtggccatttcagaaaccgaactacacagaaattcgccagtattgcaatcattggaggaacttcgctgatatcgatgactcatgggcctccataaagagcatcttggactggaccagtcggaatcaggagcgaattgtggatgtcgcaggccctggaggatggaacgatccagacatgctggtgatcggcaattttggcctctcttgggaccagcaggttacccaaatggctctgtgggcaattatggccggtcctcttttcatgagcaacgatctgcgcgcgatctcaccacaggcaaaggccctgctccaagacaaagatgtgatagccatcaatcaggacccgttgggaaagcagggctaccagctgagaaaaggcgacaactttgaggtctgggaaaggcctttgagtggagatgcgtgggctgtggcccatattaatcggcaagagatcggaggtccacgctcctatacaattcctgtagcatctcttggcaagggcgttgcctgtaacccagcttgcttcatcactcagcttctgccggtgaagagaaaactgggtttctacgaagctaccagcaggctccgatcccacatcaaccctacaggaaccgtcctcttgcagctggagaatacgatgcagacttcactgaaggacctcctg

SEQ ID NO: 1386 - protein, 398 aa, Artificial Sequence
  variant of human alpha-galactosidase A
LDNGLARTPPMGWLHWERFMCNLDCQEEPDSCISEKLFEEMAERMVTEGWKDAGYEYLCIDDCWMAPQRDSEGRLQADPQRFPHGIRQLANHVHSKGLKLGIYADVGNKTCAGFPGSFGYYDIDAQTFADWGVDLLKFDGCYCDSLENLADGYKHMSLALNRTGRPIVYSCEWPLYMWPFQKPNYTEIRQYCNHWRNFADIDDSWASIKSILDWTSRNQERIVDVAGPGGWNDPDMLVIGNFGLSWDQQVTQMALWAIMAGPLFMSNDLRAISPQAKALLQDKDVIAINQDPLGKQGYQLRKGDNFEVWERPLSGDAWAVAHINRQEIGGPRSYTIPVASLGKGVACNPACFITQLLPVKRKLGFYEATSRLRSHINPTGTVLLQLENTMQTSLKDLL

SEQ ID NO: 1387 - DNA, 1194 bp, Artificial Sequence
  variant of human alpha-galactosidase A
ctggataatggattggctagaacacctcctatggggtggcttcactgggagaggttcatgtgcaacctggactgtcaggaagaaccagacagctgcatctccgagaagctctttgaggaaatggccgaacgaatggtgactgagggctggaaagatgcaggttacgagtatctgtgtattgacgattgctggatggccccacaacgggattctgagggaagacttcaggctgatccgcagcgcttccctcatggcataaggcagctggcaaaccacgtccacagtaaggggctcaaattgggaatctacgcggacgtgggcaataagacctgtgccggttttccgggatcattcgggtattatgacattgacgcccaaacgtttgctgattggggcgttgacctgctgaaattcgatggttgctactgtgacagcctcgaaaacctggcagacggctacaagcatatgtctctcgccctgaatagaaccggtcggccaatcgtatattcctgcgagtggcctctttacatgtggccatttcagaaaccgaactacacagaaattcgccagtattgcaatcattggaggaacttcgctgatatcgatgactcatgggcctccataaagagcatcttggactggaccagtcggaatcaggagcgaattgtggatgtcgcaggccctggaggatggaacgatccagacatgctggtgatcggcaattttggcctctcttgggaccagcaggttacccaaatggctctgtgggcaattatggccggtcctcttttcatgagcaacgatctgcgcgcgatctcaccacaggcaaaggccctgctccaagacaaagatgtgatagccatcaatcaggacccgttgggaaagcagggctaccagctgagaaaaggcgacaactttgaggtctgggaaaggcctttgagtggagatgcgtgggctgtggccaagattaatcggcaagagatcggaggtccacgctcctatacaattcctgtagcatctcttggcaagggcgttgcctgtaacccagcttgcttcatcactcagcttctgccggtgaagagaaaactgggtttctacgaagctaccagcaggctccgatcccacatcaaccctacaggaaccgtcctcttgcagctggagaatacgatgcagacttcactgaaggacctcctg

SEQ ID NO: 1388 - protein, 398 aa, Artificial Sequence
  variant of human alpha-galactosidase A
LDNGLARTPPMGWLHWERFMCNLDCQEEPDSCISEKLFEEMAERMVTEGWKDAGYEYLCIDDCWMAPQRDSEGRLQADPQRFPHGIRQLANHVHSKGLKLGIYADVGNKTCAGFPGSFGYYDIDAQTFADWGVDLLKFDGCYCDSLENLADGYKHMSLALNRTGRPIVYSCEWPLYMWPFQKPNYTEIRQYCNHWRNFADIDDSWASIKSILDWTSRNQERIVDVAGPGGWNDPDMLVIGNFGLSWDQQVTQMALWAIMAGPLFMSNDLRAISPQAKALLQDKDVIAINQDPLGKQGYQLRKGDNFEVWERPLSGDAWAVAKINRQEIGGPRSYTIPVASLGKGVACNPACFITQLLPVKRKLGFYEATSRLRSHINPTGTVLLQLENTMQTSLKDLL

SEQ ID NO: 1389 - DNA, 1194 bp, Artificial Sequence
  variant of human alpha-galactosidase A
ctggataatggattggctagaacacctcctatggggtggcttcactgggagaggttcatgtgcaacctggactgtcaggaagaaccagacagctgcatctccgagaagctctttgaggaaatggccgaacgaatggtgactgagggctggaaagatgcaggttacgagtatctgtgtattgacgattgctggatggccccacaacgggattctgagggaagacttcaggctgatccgcagcgcttccctcatggcataaggcagctggcaaaccacgtccacagtaaggggctcaaattgggaatctacgcggacgtgggcaataagacctgtgccggttttccgggatcattcgggtattatgacattgacgcccaaacgtttgctgattggggcgttgacctgctgaaattcgatggttgctactgtgacagcctcgaaaacctggcagacggctacaagcatatgtctctcgccctgaatagaaccggtcggccaatcgtatattcctgcgagtggcctctttacatgtggccatttcagaaaccgaactacacagaaattcgccagtattgcaatcattggaggaacttcgctgatatcgatgactcatgggcctccataaagagcatcttggactggaccagtcggaatcaggagcgaattgtggatgtcgcaggccctggaggatggaacgatccagacatgctggtgatcggcaattttggcctctcttgggaccagcaggttacccaaatggctctgtgggcaattatggccggtcctcttttcatgagcaacgatctgcgcgcgatctcaccacaggcaaaggccctgctccaagacaaagatgtgatagccatcaatcaggacccgttgggaaagcagggctaccagctgagaaaaggcgacaactttgaggtctgggaaaggcctttgagtggagatgcgtgggctgtggcccttattaatcggcaagagatcggaggtccacgctcctatacaattcctgtagcatctcttggcaagggcgttgcctgtaacccagcttgcttcatcactcagcttctgccggtgaagagaaaactgggtttctacgaagctaccagcaggctccgatcccacatcaaccctacaggaaccgtcctcttgcagctggagaatacgatgcagacttcactgaaggacctcctg

SEQ ID NO: 1390 - protein, 398 aa, Artificial Sequence
  variant of human alpha-galactosidase A
LDNGLARTPPMGWLHWERFMCNLDCQEEPDSCISEKLFEEMAERMVTEGWKDAGYEYLCIDDCWMAPQRDSEGRLQADPQRFPHGIRQLANHVHSKGLKLGIYADVGNKTCAGFPGSFGYYDIDAQTFADWGVDLLKFDGCYCDSLENLADGYKHMSLALNRTGRPIVYSCEWPLYMWPFQKPNYTEIRQYCNHWRNFADIDDSWASIKSILDWTSRNQERIVDVAGPGGWNDPDMLVIGNFGLSWDQQVTQMALWAIMAGPLFMSNDLRAISPQAKALLQDKDVIAINQDPLGKQGYQLRKGDNFEVWERPLSGDAWAVALINRQEIGGPRSYTIPVASLGKGVACNPACFITQLLPVKRKLGFYEATSRLRSHINPTGTVLLQLENTMQTSLKDLL

SEQ ID NO: 1391 - DNA, 1194 bp, Artificial Sequence
  variant of human alpha-galactosidase A
ctggataatggattggctagaacacctcctatggggtggcttcactgggagaggttcatgtgcaacctggactgtcaggaagaaccagacagctgcatctccgagaagctctttgaggaaatggccgaacgaatggtgactgagggctggaaagatgcaggttacgagtatctgtgtattgacgattgctggatggccccacaacgggattctgagggaagacttcaggctgatccgcagcgcttccctcatggcataaggcagctggcaaaccacgtccacagtaaggggctcaaattgggaatctacgcggacgtgggcaataagacctgtgccggttttccgggatcattcgggtattatgacattgacgcccaaacgtttgctgattggggcgttgacctgctgaaattcgatggttgctactgtgacagcctcgaaaacctggcagacggctacaagcatatgtctctcgccctgaatagaaccggtcggccaatcgtatattcctgcgagtggcctctttacatgtggccatttcagaaaccgaactacacagaaattcgccagtattgcaatcattggaggaacttcgctgatatcgatgactcatgggcctccataaagagcatcttggactggaccagtcggaatcaggagcgaattgtggatgtcgcaggccctggaggatggaacgatccagacatgctggtgatcggcaattttggcctctcttgggaccagcaggttacccaaatggctctgtgggcaattatggccggtcctcttttcatgagcaacgatctgcgcgcgatctcaccacaggcaaaggccctgctccaagacaaagatgtgatagccatcaatcaggacccgttgggaaagcagggctaccagctgagaaaaggcgacaactttgaggtctgggaaaggcctttgagtggagatgcgtgggctgtggccatgattaatcggcaagagatcggaggtccacgctcctatacaattcctgtagcatctcttggcaagggcgttgcctgtaacccagcttgcttcatcactcagcttctgccggtgaagagaaaactgggtttctacgaagctaccagcaggctccgatcccacatcaaccctacaggaaccgtcctcttgcagctggagaatacgatgcagacttcactgaaggacctcctg

SEQ ID NO: 1392 - protein, 398 aa, Artificial Sequence
  variant of human alpha-galactosidase A
LDNGLARTPPMGWLHWERFMCNLDCQEEPDSCISEKLFEEMAERMVTEGWKDAGYEYLCIDDCWMAPQRDSEGRLQADPQRFPHGIRQLANHVHSKGLKLGIYADVGNKTCAGFPGSFGYYDIDAQTFADWGVDLLKFDGCYCDSLENLADGYKHMSLALNRTGRPIVYSCEWPLYMWPFQKPNYTEIRQYCNHWRNFADIDDSWASIKSILDWTSRNQERIVDVAGPGGWNDPDMLVIGNFGLSWDQQVTQMALWAIMAGPLFMSNDLRAISPQAKALLQDKDVIAINQDPLGKQGYQLRKGDNFEVWERPLSGDAWAVAMINRQEIGGPRSYTIPVASLGKGVACNPACFITQLLPVKRKLGFYEATSRLRSHINPTGTVLLQLENTMQTSLKDLL

SEQ ID NO: 1393 - DNA, 1194 bp, Artificial Sequence
  variant of human alpha-galactosidase A
ctggataatggattggctagaacacctcctatggggtggcttcactgggagaggttcatgtgcaacctggactgtcaggaagaaccagacagctgcatctccgagaagctctttgaggaaatggccgaacgaatggtgactgagggctggaaagatgcaggttacgagtatctgtgtattgacgattgctggatggccccacaacgggattctgagggaagacttcaggctgatccgcagcgcttccctcatggcataaggcagctggcaaaccacgtccacagtaaggggctcaaattgggaatctacgcggacgtgggcaataagacctgtgccggttttccgggatcattcgggtattatgacattgacgcccaaacgtttgctgattggggcgttgacctgctgaaattcgatggttgctactgtgacagcctcgaaaacctggcagacggctacaagcatatgtctctcgccctgaatagaaccggtcggccaatcgtatattcctgcgagtggcctctttacatgtggccatttcagaaaccgaactacacagaaattcgccagtattgcaatcattggaggaacttcgctgatatcgatgactcatgggcctccataaagagcatcttggactggaccagtcggaatcaggagcgaattgtggatgtcgcaggccctggaggatggaacgatccagacatgctggtgatcggcaattttggcctctcttgggaccagcaggttacccaaatggctctgtgggcaattatggccggtcctcttttcatgagcaacgatctgcgcgcgatctcaccacaggcaaaggccctgctccaagacaaagatgtgatagccatcaatcaggacccgttgggaaagcagggctaccagctgagaaaaggcgacaactttgaggtctgggaaaggcctttgagtggagatgcgtgggctgtggccaatattaatcggcaagagatcggaggtccacgctcctatacaattcctgtagcatctcttggcaagggcgttgcctgtaacccagcttgcttcatcactcagcttctgccggtgaagagaaaactgggtttctacgaagctaccagcaggctccgatcccacatcaaccctacaggaaccgtcctcttgcagctggagaatacgatgcagacttcactgaaggacctcctg

SEQ ID NO: 1394 - protein, 398 aa, Artificial Sequence
  variant of human alpha-galactosidase A
LDNGLARTPPMGWLHWERFMCNLDCQEEPDSCISEKLFEEMAERMVTEGWKDAGYEYLCIDDCWMAPQRDSEGRLQADPQRFPHGIRQLANHVHSKGLKLGIYADVGNKTCAGFPGSFGYYDIDAQTFADWGVDLLKFDGCYCDSLENLADGYKHMSLALNRTGRPIVYSCEWPLYMWPFQKPNYTEIRQYCNHWRNFADIDDSWASIKSILDWTSRNQERIVDVAGPGGWNDPDMLVIGNFGLSWDQQVTQMALWAIMAGPLFMSNDLRAISPQAKALLQDKDVIAINQDPLGKQGYQLRKGDNFEVWERPLSGDAWAVANINRQEIGGPRSYTIPVASLGKGVACNPACFITQLLPVKRKLGFYEATSRLRSHINPTGTVLLQLENTMQTSLKDLL

SEQ ID NO: 1395 - DNA, 1194 bp, Artificial Sequence
  variant of human alpha-galactosidase A
ctggataatggattggctagaacacctcctatggggtggcttcactgggagaggttcatgtgcaacctggactgtcaggaagaaccagacagctgcatctccgagaagctctttgaggaaatggccgaacgaatggtgactgagggctggaaagatgcaggttacgagtatctgtgtattgacgattgctggatggccccacaacgggattctgagggaagacttcaggctgatccgcagcgcttccctcatggcataaggcagctggcaaaccacgtccacagtaaggggctcaaattgggaatctacgcggacgtgggcaataagacctgtgccggttttccgggatcattcgggtattatgacattgacgcccaaacgtttgctgattggggcgttgacctgctgaaattcgatggttgctactgtgacagcctcgaaaacctggcagacggctacaagcatatgtctctcgccctgaatagaaccggtcggccaatcgtatattcctgcgagtggcctctttacatgtggccatttcagaaaccgaactacacagaaattcgccagtattgcaatcattggaggaacttcgctgatatcgatgactcatgggcctccataaagagcatcttggactggaccagtcggaatcaggagcgaattgtggatgtcgcaggccctggaggatggaacgatccagacatgctggtgatcggcaattttggcctctcttgggaccagcaggttacccaaatggctctgtgggcaattatggccggtcctcttttcatgagcaacgatctgcgcgcgatctcaccacaggcaaaggccctgctccaagacaaagatgtgatagccatcaatcaggacccgttgggaaagcagggctaccagctgagaaaaggcgacaactttgaggtctgggaaaggcctttgagtggagatgcgtgggctgtggcccctattaatcggcaagagatcggaggtccacgctcctatacaattcctgtagcatctcttggcaagggcgttgcctgtaacccagcttgcttcatcactcagcttctgccggtgaagagaaaactgggtttctacgaagctaccagcaggctccgatcccacatcaaccctacaggaaccgtcctcttgcagctggagaatacgatgcagacttcactgaaggacctcctg

SEQ ID NO: 1396 - protein, 398 aa, Artificial Sequence
  variant of human alpha-galactosidase A
LDNGLARTPPMGWLHWERFMCNLDCQEEPDSCISEKLFEEMAERMVTEGWKDAGYEYLCIDDCWMAPQRDSEGRLQADPQRFPHGIRQLANHVHSKGLKLGIYADVGNKTCAGFPGSFGYYDIDAQTFADWGVDLLKFDGCYCDSLENLADGYKHMSLALNRTGRPIVYSCEWPLYMWPFQKPNYTEIRQYCNHWRNFADIDDSWASIKSILDWTSRNQERIVDVAGPGGWNDPDMLVIGNFGLSWDQQVTQMALWAIMAGPLFMSNDLRAISPQAKALLQDKDVIAINQDPLGKQGYQLRKGDNFEVWERPLSGDAWAVAPINRQEIGGPRSYTIPVASLGKGVACNPACFITQLLPVKRKLGFYEATSRLRSHINPTGTVLLQLENTMQTSLKDLL

SEQ ID NO: 1397 - DNA, 1194 bp, Artificial Sequence
  variant of human alpha-galactosidase A
ctggataatggattggctagaacacctcctatggggtggcttcactgggagaggttcatgtgcaacctggactgtcaggaagaaccagacagctgcatctccgagaagctctttgaggaaatggccgaacgaatggtgactgagggctggaaagatgcaggttacgagtatctgtgtattgacgattgctggatggccccacaacgggattctgagggaagacttcaggctgatccgcagcgcttccctcatggcataaggcagctggcaaaccacgtccacagtaaggggctcaaattgggaatctacgcggacgtgggcaataagacctgtgccggttttccgggatcattcgggtattatgacattgacgcccaaacgtttgctgattggggcgttgacctgctgaaattcgatggttgctactgtgacagcctcgaaaacctggcagacggctacaagcatatgtctctcgccctgaatagaaccggtcggccaatcgtatattcctgcgagtggcctctttacatgtggccatttcagaaaccgaactacacagaaattcgccagtattgcaatcattggaggaacttcgctgatatcgatgactcatgggcctccataaagagcatcttggactggaccagtcggaatcaggagcgaattgtggatgtcgcaggccctggaggatggaacgatccagacatgctggtgatcggcaattttggcctctcttgggaccagcaggttacccaaatggctctgtgggcaattatggccggtcctcttttcatgagcaacgatctgcgcgcgatctcaccacaggcaaaggccctgctccaagacaaagatgtgatagccatcaatcaggacccgttgggaaagcagggctaccagctgagaaaaggcgacaactttgaggtctgggaaaggcctttgagtggagatgcgtgggctgtggcccagattaatcggcaagagatcggaggtccacgctcctatacaattcctgtagcatctcttggcaagggcgttgcctgtaacccagcttgcttcatcactcagcttctgccggtgaagagaaaactgggtttctacgaagctaccagcaggctccgatcccacatcaaccctacaggaaccgtcctcttgcagctggagaatacgatgcagacttcactgaaggacctcctg

SEQ ID NO: 1398 - protein, 398 aa, Artificial Sequence
  variant of human alpha-galactosidase A
LDNGLARTPPMGWLHWERFMCNLDCQEEPDSCISEKLFEEMAERMVTEGWKDAGYEYLCIDDCWMAPQRDSEGRLQADPQRFPHGIRQLANHVHSKGLKLGIYADVGNKTCAGFPGSFGYYDIDAQTFADWGVDLLKFDGCYCDSLENLADGYKHMSLALNRTGRPIVYSCEWPLYMWPFQKPNYTEIRQYCNHWRNFADIDDSWASIKSILDWTSRNQERIVDVAGPGGWNDPDMLVIGNFGLSWDQQVTQMALWAIMAGPLFMSNDLRAISPQAKALLQDKDVIAINQDPLGKQGYQLRKGDNFEVWERPLSGDAWAVAQINRQEIGGPRSYTIPVASLGKGVACNPACFITQLLPVKRKLGFYEATSRLRSHINPTGTVLLQLENTMQTSLKDLL

SEQ ID NO: 1399 - DNA, 1194 bp, Artificial Sequence
  variant of human alpha-galactosidase A
ctggataatggattggctagaacacctcctatggggtggcttcactgggagaggttcatgtgcaacctggactgtcaggaagaaccagacagctgcatctccgagaagctctttgaggaaatggccgaacgaatggtgactgagggctggaaagatgcaggttacgagtatctgtgtattgacgattgctggatggccccacaacgggattctgagggaagacttcaggctgatccgcagcgcttccctcatggcataaggcagctggcaaaccacgtccacagtaaggggctcaaattgggaatctacgcggacgtgggcaataagacctgtgccggttttccgggatcattcgggtattatgacattgacgcccaaacgtttgctgattggggcgttgacctgctgaaattcgatggttgctactgtgacagcctcgaaaacctggcagacggctacaagcatatgtctctcgccctgaatagaaccggtcggccaatcgtatattcctgcgagtggcctctttacatgtggccatttcagaaaccgaactacacagaaattcgccagtattgcaatcattggaggaacttcgctgatatcgatgactcatgggcctccataaagagcatcttggactggaccagtcggaatcaggagcgaattgtggatgtcgcaggccctggaggatggaacgatccagacatgctggtgatcggcaattttggcctctcttgggaccagcaggttacccaaatggctctgtgggcaattatggccggtcctcttttcatgagcaacgatctgcgcgcgatctcaccacaggcaaaggccctgctccaagacaaagatgtgatagccatcaatcaggacccgttgggaaagcagggctaccagctgagaaaaggcgacaactttgaggtctgggaaaggcctttgagtggagatgcgtgggctgtggcccggattaatcggcaagagatcggaggtccacgctcctatacaattcctgtagcatctcttggcaagggcgttgcctgtaacccagcttgcttcatcactcagcttctgccggtgaagagaaaactgggtttctacgaagctaccagcaggctccgatcccacatcaaccctacaggaaccgtcctcttgcagctggagaatacgatgcagacttcactgaaggacctcctg

SEQ ID NO: 1400 - protein, 398 aa, Artificial Sequence
  variant of human alpha-galactosidase A
LDNGLARTPPMGWLHWERFMCNLDCQEEPDSCISEKLFEEMAERMVTEGWKDAGYEYLCIDDCWMAPQRDSEGRLQADPQRFPHGIRQLANHVHSKGLKLGIYADVGNKTCAGFPGSFGYYDIDAQTFADWGVDLLKFDGCYCDSLENLADGYKHMSLALNRTGRPIVYSCEWPLYMWPFQKPNYTEIRQYCNHWRNFADIDDSWASIKSILDWTSRNQERIVDVAGPGGWNDPDMLVIGNFGLSWDQQVTQMALWAIMAGPLFMSNDLRAISPQAKALLQDKDVIAINQDPLGKQGYQLRKGDNFEVWERPLSGDAWAVARINRQEIGGPRSYTIPVASLGKGVACNPACFITQLLPVKRKLGFYEATSRLRSHINPTGTVLLQLENTMQTSLKDLL

SEQ ID NO: 1401 - DNA, 1194 bp, Artificial Sequence
  variant of human alpha-galactosidase A
ctggataatggattggctagaacacctcctatggggtggcttcactgggagaggttcatgtgcaacctggactgtcaggaagaaccagacagctgcatctccgagaagctctttgaggaaatggccgaacgaatggtgactgagggctggaaagatgcaggttacgagtatctgtgtattgacgattgctggatggccccacaacgggattctgagggaagacttcaggctgatccgcagcgcttccctcatggcataaggcagctggcaaaccacgtccacagtaaggggctcaaattgggaatctacgcggacgtgggcaataagacctgtgccggttttccgggatcattcgggtattatgacattgacgcccaaacgtttgctgattggggcgttgacctgctgaaattcgatggttgctactgtgacagcctcgaaaacctggcagacggctacaagcatatgtctctcgccctgaatagaaccggtcggccaatcgtatattcctgcgagtggcctctttacatgtggccatttcagaaaccgaactacacagaaattcgccagtattgcaatcattggaggaacttcgctgatatcgatgactcatgggcctccataaagagcatcttggactggaccagtcggaatcaggagcgaattgtggatgtcgcaggccctggaggatggaacgatccagacatgctggtgatcggcaattttggcctctcttgggaccagcaggttacccaaatggctctgtgggcaattatggccggtcctcttttcatgagcaacgatctgcgcgcgatctcaccacaggcaaaggccctgctccaagacaaagatgtgatagccatcaatcaggacccgttgggaaagcagggctaccagctgagaaaaggcgacaactttgaggtctgggaaaggcctttgagtggagatgcgtgggctgtggcctctattaatcggcaagagatcggaggtccacgctcctatacaattcctgtagcatctcttggcaagggcgttgcctgtaacccagcttgcttcatcactcagcttctgccggtgaagagaaaactgggtttctacgaagctaccagcaggctccgatcccacatcaaccctacaggaaccgtcctcttgcagctggagaatacgatgcagacttcactgaaggacctcctg

SEQ ID NO: 1402 - protein, 398 aa, Artificial Sequence
  variant of human alpha-galactosidase A
LDNGLARTPPMGWLHWERFMCNLDCQEEPDSCISEKLFEEMAERMVTEGWKDAGYEYLCIDDCWMAPQRDSEGRLQADPQRFPHGIRQLANHVHSKGLKLGIYADVGNKTCAGFPGSFGYYDIDAQTFADWGVDLLKFDGCYCDSLENLADGYKHMSLALNRTGRPIVYSCEWPLYMWPFQKPNYTEIRQYCNHWRNFADIDDSWASIKSILDWTSRNQERIVDVAGPGGWNDPDMLVIGNFGLSWDQQVTQMALWAIMAGPLFMSNDLRAISPQAKALLQDKDVIAINQDPLGKQGYQLRKGDNFEVWERPLSGDAWAVASINRQEIGGPRSYTIPVASLGKGVACNPACFITQLLPVKRKLGFYEATSRLRSHINPTGTVLLQLENTMQTSLKDLL

SEQ ID NO: 1403 - DNA, 1194 bp, Artificial Sequence
  variant of human alpha-galactosidase A
ctggataatggattggctagaacacctcctatggggtggcttcactgggagaggttcatgtgcaacctggactgtcaggaagaaccagacagctgcatctccgagaagctctttgaggaaatggccgaacgaatggtgactgagggctggaaagatgcaggttacgagtatctgtgtattgacgattgctggatggccccacaacgggattctgagggaagacttcaggctgatccgcagcgcttccctcatggcataaggcagctggcaaaccacgtccacagtaaggggctcaaattgggaatctacgcggacgtgggcaataagacctgtgccggttttccgggatcattcgggtattatgacattgacgcccaaacgtttgctgattggggcgttgacctgctgaaattcgatggttgctactgtgacagcctcgaaaacctggcagacggctacaagcatatgtctctcgccctgaatagaaccggtcggccaatcgtatattcctgcgagtggcctctttacatgtggccatttcagaaaccgaactacacagaaattcgccagtattgcaatcattggaggaacttcgctgatatcgatgactcatgggcctccataaagagcatcttggactggaccagtcggaatcaggagcgaattgtggatgtcgcaggccctggaggatggaacgatccagacatgctggtgatcggcaattttggcctctcttgggaccagcaggttacccaaatggctctgtgggcaattatggccggtcctcttttcatgagcaacgatctgcgcgcgatctcaccacaggcaaaggccctgctccaagacaaagatgtgatagccatcaatcaggacccgttgggaaagcagggctaccagctgagaaaaggcgacaactttgaggtctgggaaaggcctttgagtggagatgcgtgggctgtggccacgattaatcggcaagagatcggaggtccacgctcctatacaattcctgtagcatctcttggcaagggcgttgcctgtaacccagcttgcttcatcactcagcttctgccggtgaagagaaaactgggtttctacgaagctaccagcaggctccgatcccacatcaaccctacaggaaccgtcctcttgcagctggagaatacgatgcagacttcactgaaggacctcctg

SEQ ID NO: 1404 - protein, 398 aa, Artificial Sequence
  variant of human alpha-galactosidase A
LDNGLARTPPMGWLHWERFMCNLDCQEEPDSCISEKLFEEMAERMVTEGWKDAGYEYLCIDDCWMAPQRDSEGRLQADPQRFPHGIRQLANHVHSKGLKLGIYADVGNKTCAGFPGSFGYYDIDAQTFADWGVDLLKFDGCYCDSLENLADGYKHMSLALNRTGRPIVYSCEWPLYMWPFQKPNYTEIRQYCNHWRNFADIDDSWASIKSILDWTSRNQERIVDVAGPGGWNDPDMLVIGNFGLSWDQQVTQMALWAIMAGPLFMSNDLRAISPQAKALLQDKDVIAINQDPLGKQGYQLRKGDNFEVWERPLSGDAWAVATINRQEIGGPRSYTIPVASLGKGVACNPACFITQLLPVKRKLGFYEATSRLRSHINPTGTVLLQLENTMQTSLKDLL

SEQ ID NO: 1405 - DNA, 1194 bp, Artificial Sequence
  variant of human alpha-galactosidase A
ctggataatggattggctagaacacctcctatggggtggcttcactgggagaggttcatgtgcaacctggactgtcaggaagaaccagacagctgcatctccgagaagctctttgaggaaatggccgaacgaatggtgactgagggctggaaagatgcaggttacgagtatctgtgtattgacgattgctggatggccccacaacgggattctgagggaagacttcaggctgatccgcagcgcttccctcatggcataaggcagctggcaaaccacgtccacagtaaggggctcaaattgggaatctacgcggacgtgggcaataagacctgtgccggttttccgggatcattcgggtattatgacattgacgcccaaacgtttgctgattggggcgttgacctgctgaaattcgatggttgctactgtgacagcctcgaaaacctggcagacggctacaagcatatgtctctcgccctgaatagaaccggtcggccaatcgtatattcctgcgagtggcctctttacatgtggccatttcagaaaccgaactacacagaaattcgccagtattgcaatcattggaggaacttcgctgatatcgatgactcatgggcctccataaagagcatcttggactggaccagtcggaatcaggagcgaattgtggatgtcgcaggccctggaggatggaacgatccagacatgctggtgatcggcaattttggcctctcttgggaccagcaggttacccaaatggctctgtgggcaattatggccggtcctcttttcatgagcaacgatctgcgcgcgatctcaccacaggcaaaggccctgctccaagacaaagatgtgatagccatcaatcaggacccgttgggaaagcagggctaccagctgagaaaaggcgacaactttgaggtctgggaaaggcctttgagtggagatgcgtgggctgtggccgttattaatcggcaagagatcggaggtccacgctcctatacaattcctgtagcatctcttggcaagggcgttgcctgtaacccagcttgcttcatcactcagcttctgccggtgaagagaaaactgggtttctacgaagctaccagcaggctccgatcccacatcaaccctacaggaaccgtcctcttgcagctggagaatacgatgcagacttcactgaaggacctcctg

SEQ ID NO: 1406 - protein, 398 aa, Artificial Sequence
  variant of human alpha-galactosidase A
LDNGLARTPPMGWLHWERFMCNLDCQEEPDSCISEKLFEEMAERMVTEGWKDAGYEYLCIDDCWMAPQRDSEGRLQADPQRFPHGIRQLANHVHSKGLKLGIYADVGNKTCAGFPGSFGYYDIDAQTFADWGVDLLKFDGCYCDSLENLADGYKHMSLALNRTGRPIVYSCEWPLYMWPFQKPNYTEIRQYCNHWRNFADIDDSWASIKSILDWTSRNQERIVDVAGPGGWNDPDMLVIGNFGLSWDQQVTQMALWAIMAGPLFMSNDLRAISPQAKALLQDKDVIAINQDPLGKQGYQLRKGDNFEVWERPLSGDAWAVAVINRQEIGGPRSYTIPVASLGKGVACNPACFITQLLPVKRKLGFYEATSRLRSHINPTGTVLLQLENTMQTSLKDLL

SEQ ID NO: 1407 - DNA, 1194 bp, Artificial Sequence
  variant of human alpha-galactosidase A
ctggataatggattggctagaacacctcctatggggtggcttcactgggagaggttcatgtgcaacctggactgtcaggaagaaccagacagctgcatctccgagaagctctttgaggaaatggccgaacgaatggtgactgagggctggaaagatgcaggttacgagtatctgtgtattgacgattgctggatggccccacaacgggattctgagggaagacttcaggctgatccgcagcgcttccctcatggcataaggcagctggcaaaccacgtccacagtaaggggctcaaattgggaatctacgcggacgtgggcaataagacctgtgccggttttccgggatcattcgggtattatgacattgacgcccaaacgtttgctgattggggcgttgacctgctgaaattcgatggttgctactgtgacagcctcgaaaacctggcagacggctacaagcatatgtctctcgccctgaatagaaccggtcggccaatcgtatattcctgcgagtggcctctttacatgtggccatttcagaaaccgaactacacagaaattcgccagtattgcaatcattggaggaacttcgctgatatcgatgactcatgggcctccataaagagcatcttggactggaccagtcggaatcaggagcgaattgtggatgtcgcaggccctggaggatggaacgatccagacatgctggtgatcggcaattttggcctctcttgggaccagcaggttacccaaatggctctgtgggcaattatggccggtcctcttttcatgagcaacgatctgcgcgcgatctcaccacaggcaaaggccctgctccaagacaaagatgtgatagccatcaatcaggacccgttgggaaagcagggctaccagctgagaaaaggcgacaactttgaggtctgggaaaggcctttgagtggagatgcgtgggctgtggcctggattaatcggcaagagatcggaggtccacgctcctatacaattcctgtagcatctcttggcaagggcgttgcctgtaacccagcttgcttcatcactcagcttctgccggtgaagagaaaactgggtttctacgaagctaccagcaggctccgatcccacatcaaccctacaggaaccgtcctcttgcagctggagaatacgatgcagacttcactgaaggacctcctg

SEQ ID NO: 1408 - protein, 398 aa, Artificial Sequence
  variant of human alpha-galactosidase A
LDNGLARTPPMGWLHWERFMCNLDCQEEPDSCISEKLFEEMAERMVTEGWKDAGYEYLCIDDCWMAPQRDSEGRLQADPQRFPHGIRQLANHVHSKGLKLGIYADVGNKTCAGFPGSFGYYDIDAQTFADWGVDLLKFDGCYCDSLENLADGYKHMSLALNRTGRPIVYSCEWPLYMWPFQKPNYTEIRQYCNHWRNFADIDDSWASIKSILDWTSRNQERIVDVAGPGGWNDPDMLVIGNFGLSWDQQVTQMALWAIMAGPLFMSNDLRAISPQAKALLQDKDVIAINQDPLGKQGYQLRKGDNFEVWERPLSGDAWAVAWINRQEIGGPRSYTIPVASLGKGVACNPACFITQLLPVKRKLGFYEATSRLRSHINPTGTVLLQLENTMQTSLKDLL

SEQ ID NO: 1409 - DNA, 1194 bp, Artificial Sequence
  variant of human alpha-galactosidase A
ctggataatggattggctagaacacctcctatggggtggcttcactgggagaggttcatgtgcaacctggactgtcaggaagaaccagacagctgcatctccgagaagctctttgaggaaatggccgaacgaatggtgactgagggctggaaagatgcaggttacgagtatctgtgtattgacgattgctggatggccccacaacgggattctgagggaagacttcaggctgatccgcagcgcttccctcatggcataaggcagctggcaaaccacgtccacagtaaggggctcaaattgggaatctacgcggacgtgggcaataagacctgtgccggttttccgggatcattcgggtattatgacattgacgcccaaacgtttgctgattggggcgttgacctgctgaaattcgatggttgctactgtgacagcctcgaaaacctggcagacggctacaagcatatgtctctcgccctgaatagaaccggtcggccaatcgtatattcctgcgagtggcctctttacatgtggccatttcagaaaccgaactacacagaaattcgccagtattgcaatcattggaggaacttcgctgatatcgatgactcatgggcctccataaagagcatcttggactggaccagtcggaatcaggagcgaattgtggatgtcgcaggccctggaggatggaacgatccagacatgctggtgatcggcaattttggcctctcttgggaccagcaggttacccaaatggctctgtgggcaattatggccggtcctcttttcatgagcaacgatctgcgcgcgatctcaccacaggcaaaggccctgctccaagacaaagatgtgatagccatcaatcaggacccgttgggaaagcagggctaccagctgagaaaaggcgacaactttgaggtctgggaaaggcctttgagtggagatgcgtgggctgtggcctatattaatcggcaagagatcggaggtccacgctcctatacaattcctgtagcatctcttggcaagggcgttgcctgtaacccagcttgcttcatcactcagcttctgccggtgaagagaaaactgggtttctacgaagctaccagcaggctccgatcccacatcaaccctacaggaaccgtcctcttgcagctggagaatacgatgcagacttcactgaaggacctcctg

SEQ ID NO: 1410 - protein, 398 aa, Artificial Sequence
  variant of human alpha-galactosidase A
LDNGLARTPPMGWLHWERFMCNLDCQEEPDSCISEKLFEEMAERMVTEGWKDAGYEYLCIDDCWMAPQRDSEGRLQADPQRFPHGIRQLANHVHSKGLKLGIYADVGNKTCAGFPGSFGYYDIDAQTFADWGVDLLKFDGCYCDSLENLADGYKHMSLALNRTGRPIVYSCEWPLYMWPFQKPNYTEIRQYCNHWRNFADIDDSWASIKSILDWTSRNQERIVDVAGPGGWNDPDMLVIGNFGLSWDQQVTQMALWAIMAGPLFMSNDLRAISPQAKALLQDKDVIAINQDPLGKQGYQLRKGDNFEVWERPLSGDAWAVAYINRQEIGGPRSYTIPVASLGKGVACNPACFITQLLPVKRKLGFYEATSRLRSHINPTGTVLLQLENTMQTSLKDLL

SEQ ID NO: 1411 - DNA, 1194 bp, Artificial Sequence
  variant of human alpha-galactosidase A
ctggataatggattggctagaacacctcctatggggtggcttcactgggagaggttcatgtgcaacctggactgtcaggaagaaccagacagctgcatctccgagaagctctttgaggaaatggccgaacgaatggtgactgagggctggaaagatgcaggttacgagtatctgtgtattgacgattgctggatggccccacaacgggattctgagggaagacttcaggctgatccgcagcgcttccctcatggcataaggcagctggcaaaccacgtccacagtaaggggctcaaattgggaatctacgcggacgtgggcaataagacctgtgccggttttccgggatcattcgggtattatgacattgacgcccaaacgtttgctgattggggcgttgacctgctgaaattcgatggttgctactgtgacagcctcgaaaacctggcagacggctacaagcatatgtctctcgccctgaatagaaccggtcggccaatcgtatattcctgcgagtggcctctttacatgtggccatttcagaaaccgaactacacagaaattcgccagtattgcaatcattggaggaacttcgctgatatcgatgactcatgggcctccataaagagcatcttggactggaccagtcggaatcaggagcgaattgtggatgtcgcaggccctggaggatggaacgatccagacatgctggtgatcggcaattttggcctctcttgggaccagcaggttacccaaatggctctgtgggcaattatggccggtcctcttttcatgagcaacgatctgcgcgcgatctcaccacaggcaaaggccctgctccaagacaaagatgtgatagccatcaatcaggacccgttgggaaagcagggctaccagctgagagcgggcgacaactttgaggtctgggaaaggcctttgagtggagatgcgtgggctgtggccattattaatcggcaagagatcggaggtccacgctcctatacaattcctgtagcatctcttggcaagggcgttgcctgtaacccagcttgcttcatcactcagcttctgccggtgaagagaaaactgggtttctacgaagctaccagcaggctccgatcccacatcaaccctacaggaaccgtcctcttgcagctggagaatacgatgcagacttcactgaaggacctcctg

SEQ ID NO: 1412 - protein, 398 aa, Artificial Sequence
  variant of human alpha-galactosidase A
LDNGLARTPPMGWLHWERFMCNLDCQEEPDSCISEKLFEEMAERMVTEGWKDAGYEYLCIDDCWMAPQRDSEGRLQADPQRFPHGIRQLANHVHSKGLKLGIYADVGNKTCAGFPGSFGYYDIDAQTFADWGVDLLKFDGCYCDSLENLADGYKHMSLALNRTGRPIVYSCEWPLYMWPFQKPNYTEIRQYCNHWRNFADIDDSWASIKSILDWTSRNQERIVDVAGPGGWNDPDMLVIGNFGLSWDQQVTQMALWAIMAGPLFMSNDLRAISPQAKALLQDKDVIAINQDPLGKQGYQLRAGDNFEVWERPLSGDAWAVAIINRQEIGGPRSYTIPVASLGKGVACNPACFITQLLPVKRKLGFYEATSRLRSHINPTGTVLLQLENTMQTSLKDLL

SEQ ID NO: 1413 - DNA, 1194 bp, Artificial Sequence
  variant of human alpha-galactosidase A
ctggataatggattggctagaacacctcctatggggtggcttcactgggagaggttcatgtgcaacctggactgtcaggaagaaccagacagctgcatctccgagaagctctttgaggaaatggccgaacgaatggtgactgagggctggaaagatgcaggttacgagtatctgtgtattgacgattgctggatggccccacaacgggattctgagggaagacttcaggctgatccgcagcgcttccctcatggcataaggcagctggcaaaccacgtccacagtaaggggctcaaattgggaatctacgcggacgtgggcaataagacctgtgccggttttccgggatcattcgggtattatgacattgacgcccaaacgtttgctgattggggcgttgacctgctgaaattcgatggttgctactgtgacagcctcgaaaacctggcagacggctacaagcatatgtctctcgccctgaatagaaccggtcggccaatcgtatattcctgcgagtggcctctttacatgtggccatttcagaaaccgaactacacagaaattcgccagtattgcaatcattggaggaacttcgctgatatcgatgactcatgggcctccataaagagcatcttggactggaccagtcggaatcaggagcgaattgtggatgtcgcaggccctggaggatggaacgatccagacatgctggtgatcggcaattttggcctctcttgggaccagcaggttacccaaatggctctgtgggcaattatggccggtcctcttttcatgagcaacgatctgcgcgcgatctcaccacaggcaaaggccctgctccaagacaaagatgtgatagccatcaatcaggacccgttgggaaagcagggctaccagctgagatgcggcgacaactttgaggtctgggaaaggcctttgagtggagatgcgtgggctgtggccattattaatcggcaagagatcggaggtccacgctcctatacaattcctgtagcatctcttggcaagggcgttgcctgtaacccagcttgcttcatcactcagcttctgccggtgaagagaaaactgggtttctacgaagctaccagcaggctccgatcccacatcaaccctacaggaaccgtcctcttgcagctggagaatacgatgcagacttcactgaaggacctcctg

SEQ ID NO: 1414 - protein, 398 aa, Artificial Sequence
  variant of human alpha-galactosidase A
LDNGLARTPPMGWLHWERFMCNLDCQEEPDSCISEKLFEEMAERMVTEGWKDAGYEYLCIDDCWMAPQRDSEGRLQADPQRFPHGIRQLANHVHSKGLKLGIYADVGNKTCAGFPGSFGYYDIDAQTFADWGVDLLKFDGCYCDSLENLADGYKHMSLALNRTGRPIVYSCEWPLYMWPFQKPNYTEIRQYCNHWRNFADIDDSWASIKSILDWTSRNQERIVDVAGPGGWNDPDMLVIGNFGLSWDQQVTQMALWAIMAGPLFMSNDLRAISPQAKALLQDKDVIAINQDPLGKQGYQLRCGDNFEVWERPLSGDAWAVAIINRQEIGGPRSYTIPVASLGKGVACNPACFITQLLPVKRKLGFYEATSRLRSHINPTGTVLLQLENTMQTSLKDLL

SEQ ID NO: 1415 - DNA, 1194 bp, Artificial Sequence
  variant of human alpha-galactosidase A
ctggataatggattggctagaacacctcctatggggtggcttcactgggagaggttcatgtgcaacctggactgtcaggaagaaccagacagctgcatctccgagaagctctttgaggaaatggccgaacgaatggtgactgagggctggaaagatgcaggttacgagtatctgtgtattgacgattgctggatggccccacaacgggattctgagggaagacttcaggctgatccgcagcgcttccctcatggcataaggcagctggcaaaccacgtccacagtaaggggctcaaattgggaatctacgcggacgtgggcaataagacctgtgccggttttccgggatcattcgggtattatgacattgacgcccaaacgtttgctgattggggcgttgacctgctgaaattcgatggttgctactgtgacagcctcgaaaacctggcagacggctacaagcatatgtctctcgccctgaatagaaccggtcggccaatcgtatattcctgcgagtggcctctttacatgtggccatttcagaaaccgaactacacagaaattcgccagtattgcaatcattggaggaacttcgctgatatcgatgactcatgggcctccataaagagcatcttggactggaccagtcggaatcaggagcgaattgtggatgtcgcaggccctggaggatggaacgatccagacatgctggtgatcggcaattttggcctctcttgggaccagcaggttacccaaatggctctgtgggcaattatggccggtcctcttttcatgagcaacgatctgcgcgcgatctcaccacaggcaaaggccctgctccaagacaaagatgtgatagccatcaatcaggacccgttgggaaagcagggctaccagctgagagatggcgacaactttgaggtctgggaaaggcctttgagtggagatgcgtgggctgtggccattattaatcggcaagagatcggaggtccacgctcctatacaattcctgtagcatctcttggcaagggcgttgcctgtaacccagcttgcttcatcactcagcttctgccggtgaagagaaaactgggtttctacgaagctaccagcaggctccgatcccacatcaaccctacaggaaccgtcctcttgcagctggagaatacgatgcagacttcactgaaggacctcctg

SEQ ID NO: 1416 - protein, 398 aa, Artificial Sequence
  variant of human alpha-galactosidase A
LDNGLARTPPMGWLHWERFMCNLDCQEEPDSCISEKLFEEMAERMVTEGWKDAGYEYLCIDDCWMAPQRDSEGRLQADPQRFPHGIRQLANHVHSKGLKLGIYADVGNKTCAGFPGSFGYYDIDAQTFADWGVDLLKFDGCYCDSLENLADGYKHMSLALNRTGRPIVYSCEWPLYMWPFQKPNYTEIRQYCNHWRNFADIDDSWASIKSILDWTSRNQERIVDVAGPGGWNDPDMLVIGNFGLSWDQQVTQMALWAIMAGPLFMSNDLRAISPQAKALLQDKDVIAINQDPLGKQGYQLRDGDNFEVWERPLSGDAWAVAIINRQEIGGPRSYTIPVASLGKGVACNPACFITQLLPVKRKLGFYEATSRLRSHINPTGTVLLQLENTMQTSLKDLL

SEQ ID NO: 1417 - DNA, 1194 bp, Artificial Sequence
  variant of human alpha-galactosidase A
ctggataatggattggctagaacacctcctatggggtggcttcactgggagaggttcatgtgcaacctggactgtcaggaagaaccagacagctgcatctccgagaagctctttgaggaaatggccgaacgaatggtgactgagggctggaaagatgcaggttacgagtatctgtgtattgacgattgctggatggccccacaacgggattctgagggaagacttcaggctgatccgcagcgcttccctcatggcataaggcagctggcaaaccacgtccacagtaaggggctcaaattgggaatctacgcggacgtgggcaataagacctgtgccggttttccgggatcattcgggtattatgacattgacgcccaaacgtttgctgattggggcgttgacctgctgaaattcgatggttgctactgtgacagcctcgaaaacctggcagacggctacaagcatatgtctctcgccctgaatagaaccggtcggccaatcgtatattcctgcgagtggcctctttacatgtggccatttcagaaaccgaactacacagaaattcgccagtattgcaatcattggaggaacttcgctgatatcgatgactcatgggcctccataaagagcatcttggactggaccagtcggaatcaggagcgaattgtggatgtcgcaggccctggaggatggaacgatccagacatgctggtgatcggcaattttggcctctcttgggaccagcaggttacccaaatggctctgtgggcaattatggccggtcctcttttcatgagcaacgatctgcgcgcgatctcaccacaggcaaaggccctgctccaagacaaagatgtgatagccatcaatcaggacccgttgggaaagcagggctaccagctgagagagggcgacaactttgaggtctgggaaaggcctttgagtggagatgcgtgggctgtggccattattaatcggcaagagatcggaggtccacgctcctatacaattcctgtagcatctcttggcaagggcgttgcctgtaacccagcttgcttcatcactcagcttctgccggtgaagagaaaactgggtttctacgaagctaccagcaggctccgatcccacatcaaccctacaggaaccgtcctcttgcagctggagaatacgatgcagacttcactgaaggacctcctg

SEQ ID NO: 1418 - protein, 398 aa, Artificial Sequence
  variant of human alpha-galactosidase A
LDNGLARTPPMGWLHWERFMCNLDCQEEPDSCISEKLFEEMAERMVTEGWKDAGYEYLCIDDCWMAPQRDSEGRLQADPQRFPHGIRQLANHVHSKGLKLGIYADVGNKTCAGFPGSFGYYDIDAQTFADWGVDLLKFDGCYCDSLENLADGYKHMSLALNRTGRPIVYSCEWPLYMWPFQKPNYTEIRQYCNHWRNFADIDDSWASIKSILDWTSRNQERIVDVAGPGGWNDPDMLVIGNFGLSWDQQVTQMALWAIMAGPLFMSNDLRAISPQAKALLQDKDVIAINQDPLGKQGYQLREGDNFEVWERPLSGDAWAVAIINRQEIGGPRSYTIPVASLGKGVACNPACFITQLLPVKRKLGFYEATSRLRSHINPTGTVLLQLENTMQTSLKDLL

SEQ ID NO: 1419 - DNA, 1194 bp, Artificial Sequence
  variant of human alpha-galactosidase A
ctggataatggattggctagaacacctcctatggggtggcttcactgggagaggttcatgtgcaacctggactgtcaggaagaaccagacagctgcatctccgagaagctctttgaggaaatggccgaacgaatggtgactgagggctggaaagatgcaggttacgagtatctgtgtattgacgattgctggatggccccacaacgggattctgagggaagacttcaggctgatccgcagcgcttccctcatggcataaggcagctggcaaaccacgtccacagtaaggggctcaaattgggaatctacgcggacgtgggcaataagacctgtgccggttttccgggatcattcgggtattatgacattgacgcccaaacgtttgctgattggggcgttgacctgctgaaattcgatggttgctactgtgacagcctcgaaaacctggcagacggctacaagcatatgtctctcgccctgaatagaaccggtcggccaatcgtatattcctgcgagtggcctctttacatgtggccatttcagaaaccgaactacacagaaattcgccagtattgcaatcattggaggaacttcgctgatatcgatgactcatgggcctccataaagagcatcttggactggaccagtcggaatcaggagcgaattgtggatgtcgcaggccctggaggatggaacgatccagacatgctggtgatcggcaattttggcctctcttgggaccagcaggttacccaaatggctctgtgggcaattatggccggtcctcttttcatgagcaacgatctgcgcgcgatctcaccacaggcaaaggccctgctccaagacaaagatgtgatagccatcaatcaggacccgttgggaaagcagggctaccagctgagatttggcgacaactttgaggtctgggaaaggcctttgagtggagatgcgtgggctgtggccattattaatcggcaagagatcggaggtccacgctcctatacaattcctgtagcatctcttggcaagggcgttgcctgtaacccagcttgcttcatcactcagcttctgccggtgaagagaaaactgggtttctacgaagctaccagcaggctccgatcccacatcaaccctacaggaaccgtcctcttgcagctggagaatacgatgcagacttcactgaaggacctcctg

SEQ ID NO: 1420 - protein, 398 aa, Artificial Sequence
  variant of human alpha-galactosidase A
LDNGLARTPPMGWLHWERFMCNLDCQEEPDSCISEKLFEEMAERMVTEGWKDAGYEYLCIDDCWMAPQRDSEGRLQADPQRFPHGIRQLANHVHSKGLKLGIYADVGNKTCAGFPGSFGYYDIDAQTFADWGVDLLKFDGCYCDSLENLADGYKHMSLALNRTGRPIVYSCEWPLYMWPFQKPNYTEIRQYCNHWRNFADIDDSWASIKSILDWTSRNQERIVDVAGPGGWNDPDMLVIGNFGLSWDQQVTQMALWAIMAGPLFMSNDLRAISPQAKALLQDKDVIAINQDPLGKQGYQLRFGDNFEVWERPLSGDAWAVAIINRQEIGGPRSYTIPVASLGKGVACNPACFITQLLPVKRKLGFYEATSRLRSHINPTGTVLLQLENTMQTSLKDLL

SEQ ID NO: 1421 - DNA, 1194 bp, Artificial Sequence
  variant of human alpha-galactosidase A
ctggataatggattggctagaacacctcctatggggtggcttcactgggagaggttcatgtgcaacctggactgtcaggaagaaccagacagctgcatctccgagaagctctttgaggaaatggccgaacgaatggtgactgagggctggaaagatgcaggttacgagtatctgtgtattgacgattgctggatggccccacaacgggattctgagggaagacttcaggctgatccgcagcgcttccctcatggcataaggcagctggcaaaccacgtccacagtaaggggctcaaattgggaatctacgcggacgtgggcaataagacctgtgccggttttccgggatcattcgggtattatgacattgacgcccaaacgtttgctgattggggcgttgacctgctgaaattcgatggttgctactgtgacagcctcgaaaacctggcagacggctacaagcatatgtctctcgccctgaatagaaccggtcggccaatcgtatattcctgcgagtggcctctttacatgtggccatttcagaaaccgaactacacagaaattcgccagtattgcaatcattggaggaacttcgctgatatcgatgactcatgggcctccataaagagcatcttggactggaccagtcggaatcaggagcgaattgtggatgtcgcaggccctggaggatggaacgatccagacatgctggtgatcggcaattttggcctctcttgggaccagcaggttacccaaatggctctgtgggcaattatggccggtcctcttttcatgagcaacgatctgcgcgcgatctcaccacaggcaaaggccctgctccaagacaaagatgtgatagccatcaatcaggacccgttgggaaagcagggctaccagctgagaggtggcgacaactttgaggtctgggaaaggcctttgagtggagatgcgtgggctgtggccattattaatcggcaagagatcggaggtccacgctcctatacaattcctgtagcatctcttggcaagggcgttgcctgtaacccagcttgcttcatcactcagcttctgccggtgaagagaaaactgggtttctacgaagctaccagcaggctccgatcccacatcaaccctacaggaaccgtcctcttgcagctggagaatacgatgcagacttcactgaaggacctcctg

SEQ ID NO: 1422 - protein, 398 aa, Artificial Sequence
  variant of human alpha-galactosidase A
LDNGLARTPPMGWLHWERFMCNLDCQEEPDSCISEKLFEEMAERMVTEGWKDAGYEYLCIDDCWMAPQRDSEGRLQADPQRFPHGIRQLANHVHSKGLKLGIYADVGNKTCAGFPGSFGYYDIDAQTFADWGVDLLKFDGCYCDSLENLADGYKHMSLALNRTGRPIVYSCEWPLYMWPFQKPNYTEIRQYCNHWRNFADIDDSWASIKSILDWTSRNQERIVDVAGPGGWNDPDMLVIGNFGLSWDQQVTQMALWAIMAGPLFMSNDLRAISPQAKALLQDKDVIAINQDPLGKQGYQLRGGDNFEVWERPLSGDAWAVAIINRQEIGGPRSYTIPVASLGKGVACNPACFITQLLPVKRKLGFYEATSRLRSHINPTGTVLLQLENTMQTSLKDLL

SEQ ID NO: 1423 - DNA, 1194 bp, Artificial Sequence
  variant of human alpha-galactosidase A
ctggataatggattggctagaacacctcctatggggtggcttcactgggagaggttcatgtgcaacctggactgtcaggaagaaccagacagctgcatctccgagaagctctttgaggaaatggccgaacgaatggtgactgagggctggaaagatgcaggttacgagtatctgtgtattgacgattgctggatggccccacaacgggattctgagggaagacttcaggctgatccgcagcgcttccctcatggcataaggcagctggcaaaccacgtccacagtaaggggctcaaattgggaatctacgcggacgtgggcaataagacctgtgccggttttccgggatcattcgggtattatgacattgacgcccaaacgtttgctgattggggcgttgacctgctgaaattcgatggttgctactgtgacagcctcgaaaacctggcagacggctacaagcatatgtctctcgccctgaatagaaccggtcggccaatcgtatattcctgcgagtggcctctttacatgtggccatttcagaaaccgaactacacagaaattcgccagtattgcaatcattggaggaacttcgctgatatcgatgactcatgggcctccataaagagcatcttggactggaccagtcggaatcaggagcgaattgtggatgtcgcaggccctggaggatggaacgatccagacatgctggtgatcggcaattttggcctctcttgggaccagcaggttacccaaatggctctgtgggcaattatggccggtcctcttttcatgagcaacgatctgcgcgcgatctcaccacaggcaaaggccctgctccaagacaaagatgtgatagccatcaatcaggacccgttgggaaagcagggctaccagctgagacatggcgacaactttgaggtctgggaaaggcctttgagtggagatgcgtgggctgtggccattattaatcggcaagagatcggaggtccacgctcctatacaattcctgtagcatctcttggcaagggcgttgcctgtaacccagcttgcttcatcactcagcttctgccggtgaagagaaaactgggtttctacgaagctaccagcaggctccgatcccacatcaaccctacaggaaccgtcctcttgcagctggagaatacgatgcagacttcactgaaggacctcctg

SEQ ID NO: 1424 - protein, 398 aa, Artificial Sequence
  variant of human alpha-galactosidase A
LDNGLARTPPMGWLHWERFMCNLDCQEEPDSCISEKLFEEMAERMVTEGWKDAGYEYLCIDDCWMAPQRDSEGRLQADPQRFPHGIRQLANHVHSKGLKLGIYADVGNKTCAGFPGSFGYYDIDAQTFADWGVDLLKFDGCYCDSLENLADGYKHMSLALNRTGRPIVYSCEWPLYMWPFQKPNYTEIRQYCNHWRNFADIDDSWASIKSILDWTSRNQERIVDVAGPGGWNDPDMLVIGNFGLSWDQQVTQMALWAIMAGPLFMSNDLRAISPQAKALLQDKDVIAINQDPLGKQGYQLRHGDNFEVWERPLSGDAWAVAIINRQEIGGPRSYTIPVASLGKGVACNPACFITQLLPVKRKLGFYEATSRLRSHINPTGTVLLQLENTMQTSLKDLL

SEQ ID NO: 1425 - DNA, 1194 bp, Artificial Sequence
  variant of human alpha-galactosidase A
ctggataatggattggctagaacacctcctatggggtggcttcactgggagaggttcatgtgcaacctggactgtcaggaagaaccagacagctgcatctccgagaagctctttgaggaaatggccgaacgaatggtgactgagggctggaaagatgcaggttacgagtatctgtgtattgacgattgctggatggccccacaacgggattctgagggaagacttcaggctgatccgcagcgcttccctcatggcataaggcagctggcaaaccacgtccacagtaaggggctcaaattgggaatctacgcggacgtgggcaataagacctgtgccggttttccgggatcattcgggtattatgacattgacgcccaaacgtttgctgattggggcgttgacctgctgaaattcgatggttgctactgtgacagcctcgaaaacctggcagacggctacaagcatatgtctctcgccctgaatagaaccggtcggccaatcgtatattcctgcgagtggcctctttacatgtggccatttcagaaaccgaactacacagaaattcgccagtattgcaatcattggaggaacttcgctgatatcgatgactcatgggcctccataaagagcatcttggactggaccagtcggaatcaggagcgaattgtggatgtcgcaggccctggaggatggaacgatccagacatgctggtgatcggcaattttggcctctcttgggaccagcaggttacccaaatggctctgtgggcaattatggccggtcctcttttcatgagcaacgatctgcgcgcgatctcaccacaggcaaaggccctgctccaagacaaagatgtgatagccatcaatcaggacccgttgggaaagcagggctaccagctgagaattggcgacaactttgaggtctgggaaaggcctttgagtggagatgcgtgggctgtggccattattaatcggcaagagatcggaggtccacgctcctatacaattcctgtagcatctcttggcaagggcgttgcctgtaacccagcttgcttcatcactcagcttctgccggtgaagagaaaactgggtttctacgaagctaccagcaggctccgatcccacatcaaccctacaggaaccgtcctcttgcagctggagaatacgatgcagacttcactgaaggacctcctg

SEQ ID NO: 1426 - protein, 398 aa, Artificial Sequence
  variant of human alpha-galactosidase A
LDNGLARTPPMGWLHWERFMCNLDCQEEPDSCISEKLFEEMAERMVTEGWKDAGYEYLCIDDCWMAPQRDSEGRLQADPQRFPHGIRQLANHVHSKGLKLGIYADVGNKTCAGFPGSFGYYDIDAQTFADWGVDLLKFDGCYCDSLENLADGYKHMSLALNRTGRPIVYSCEWPLYMWPFQKPNYTEIRQYCNHWRNFADIDDSWASIKSILDWTSRNQERIVDVAGPGGWNDPDMLVIGNFGLSWDQQVTQMALWAIMAGPLFMSNDLRAISPQAKALLQDKDVIAINQDPLGKQGYQLRIGDNFEVWERPLSGDAWAVAIINRQEIGGPRSYTIPVASLGKGVACNPACFITQLLPVKRKLGFYEATSRLRSHINPTGTVLLQLENTMQTSLKDLL

SEQ ID NO: 1427 - DNA, 1194 bp, Artificial Sequence
  variant of human alpha-galactosidase A
ctggataatggattggctagaacacctcctatggggtggcttcactgggagaggttcatgtgcaacctggactgtcaggaagaaccagacagctgcatctccgagaagctctttgaggaaatggccgaacgaatggtgactgagggctggaaagatgcaggttacgagtatctgtgtattgacgattgctggatggccccacaacgggattctgagggaagacttcaggctgatccgcagcgcttccctcatggcataaggcagctggcaaaccacgtccacagtaaggggctcaaattgggaatctacgcggacgtgggcaataagacctgtgccggttttccgggatcattcgggtattatgacattgacgcccaaacgtttgctgattggggcgttgacctgctgaaattcgatggttgctactgtgacagcctcgaaaacctggcagacggctacaagcatatgtctctcgccctgaatagaaccggtcggccaatcgtatattcctgcgagtggcctctttacatgtggccatttcagaaaccgaactacacagaaattcgccagtattgcaatcattggaggaacttcgctgatatcgatgactcatgggcctccataaagagcatcttggactggaccagtcggaatcaggagcgaattgtggatgtcgcaggccctggaggatggaacgatccagacatgctggtgatcggcaattttggcctctcttgggaccagcaggttacccaaatggctctgtgggcaattatggccggtcctcttttcatgagcaacgatctgcgcgcgatctcaccacaggcaaaggccctgctccaagacaaagatgtgatagccatcaatcaggacccgttgggaaagcagggctaccagctgagactgggcgacaactttgaggtctgggaaaggcctttgagtggagatgcgtgggctgtggccattattaatcggcaagagatcggaggtccacgctcctatacaattcctgtagcatctcttggcaagggcgttgcctgtaacccagcttgcttcatcactcagcttctgccggtgaagagaaaactgggtttctacgaagctaccagcaggctccgatcccacatcaaccctacaggaaccgtcctcttgcagctggagaatacgatgcagacttcactgaaggacctcctg

SEQ ID NO: 1428 - protein, 398 aa, Artificial Sequence
  variant of human alpha-galactosidase A
LDNGLARTPPMGWLHWERFMCNLDCQEEPDSCISEKLFEEMAERMVTEGWKDAGYEYLCIDDCWMAPQRDSEGRLQADPQRFPHGIRQLANHVHSKGLKLGIYADVGNKTCAGFPGSFGYYDIDAQTFADWGVDLLKFDGCYCDSLENLADGYKHMSLALNRTGRPIVYSCEWPLYMWPFQKPNYTEIRQYCNHWRNFADIDDSWASIKSILDWTSRNQERIVDVAGPGGWNDPDMLVIGNFGLSWDQQVTQMALWAIMAGPLFMSNDLRAISPQAKALLQDKDVIAINQDPLGKQGYQLRLGDNFEVWERPLSGDAWAVAIINRQEIGGPRSYTIPVASLGKGVACNPACFITQLLPVKRKLGFYEATSRLRSHINPTGTVLLQLENTMQTSLKDLL

SEQ ID NO: 1429 - DNA, 1194 bp, Artificial Sequence
  variant of human alpha-galactosidase A
ctggataatggattggctagaacacctcctatggggtggcttcactgggagaggttcatgtgcaacctggactgtcaggaagaaccagacagctgcatctccgagaagctctttgaggaaatggccgaacgaatggtgactgagggctggaaagatgcaggttacgagtatctgtgtattgacgattgctggatggccccacaacgggattctgagggaagacttcaggctgatccgcagcgcttccctcatggcataaggcagctggcaaaccacgtccacagtaaggggctcaaattgggaatctacgcggacgtgggcaataagacctgtgccggttttccgggatcattcgggtattatgacattgacgcccaaacgtttgctgattggggcgttgacctgctgaaattcgatggttgctactgtgacagcctcgaaaacctggcagacggctacaagcatatgtctctcgccctgaatagaaccggtcggccaatcgtatattcctgcgagtggcctctttacatgtggccatttcagaaaccgaactacacagaaattcgccagtattgcaatcattggaggaacttcgctgatatcgatgactcatgggcctccataaagagcatcttggactggaccagtcggaatcaggagcgaattgtggatgtcgcaggccctggaggatggaacgatccagacatgctggtgatcggcaattttggcctctcttgggaccagcaggttacccaaatggctctgtgggcaattatggccggtcctcttttcatgagcaacgatctgcgcgcgatctcaccacaggcaaaggccctgctccaagacaaagatgtgatagccatcaatcaggacccgttgggaaagcagggctaccagctgagaatgggcgacaactttgaggtctgggaaaggcctttgagtggagatgcgtgggctgtggccattattaatcggcaagagatcggaggtccacgctcctatacaattcctgtagcatctcttggcaagggcgttgcctgtaacccagcttgcttcatcactcagcttctgccggtgaagagaaaactgggtttctacgaagctaccagcaggctccgatcccacatcaaccctacaggaaccgtcctcttgcagctggagaatacgatgcagacttcactgaaggacctcctg

SEQ ID NO: 1430 - protein, 398 aa, Artificial Sequence
  variant of human alpha-galactosidase A
LDNGLARTPPMGWLHWERFMCNLDCQEEPDSCISEKLFEEMAERMVTEGWKDAGYEYLCIDDCWMAPQRDSEGRLQADPQRFPHGIRQLANHVHSKGLKLGIYADVGNKTCAGFPGSFGYYDIDAQTFADWGVDLLKFDGCYCDSLENLADGYKHMSLALNRTGRPIVYSCEWPLYMWPFQKPNYTEIRQYCNHWRNFADIDDSWASIKSILDWTSRNQERIVDVAGPGGWNDPDMLVIGNFGLSWDQQVTQMALWAIMAGPLFMSNDLRAISPQAKALLQDKDVIAINQDPLGKQGYQLRMGDNFEVWERPLSGDAWAVAIINRQEIGGPRSYTIPVASLGKGVACNPACFITQLLPVKRKLGFYEATSRLRSHINPTGTVLLQLENTMQTSLKDLL

SEQ ID NO: 1431 - DNA, 1194 bp, Artificial Sequence
  variant of human alpha-galactosidase A
ctggataatggattggctagaacacctcctatggggtggcttcactgggagaggttcatgtgcaacctggactgtcaggaagaaccagacagctgcatctccgagaagctctttgaggaaatggccgaacgaatggtgactgagggctggaaagatgcaggttacgagtatctgtgtattgacgattgctggatggccccacaacgggattctgagggaagacttcaggctgatccgcagcgcttccctcatggcataaggcagctggcaaaccacgtccacagtaaggggctcaaattgggaatctacgcggacgtgggcaataagacctgtgccggttttccgggatcattcgggtattatgacattgacgcccaaacgtttgctgattggggcgttgacctgctgaaattcgatggttgctactgtgacagcctcgaaaacctggcagacggctacaagcatatgtctctcgccctgaatagaaccggtcggccaatcgtatattcctgcgagtggcctctttacatgtggccatttcagaaaccgaactacacagaaattcgccagtattgcaatcattggaggaacttcgctgatatcgatgactcatgggcctccataaagagcatcttggactggaccagtcgtaatcaggagcgaattgtggatgtcgcaggccctggaggatggaacgatccagacatgctggtgatcggcaattttggcctctcttgggaccagcaggttacccaaatggctctgtgggcaattatggccggtcctcttttcatgagcaacgatctgcgcgcgatctcaccacaggcaaaggccctgctccaagacaaagatgtgatagccatcaatcaggacccgttgggaaagcagggctaccagctgagaaatggcgacaactttgaggtctgggaaaggcctttgagtggagatgcgtgggctgtggccattattaatcggcaagagatcggaggtccacgctcctatacaattcctgtagcatctcttggcaagggcgttgcctgtaacccagcttgcttcatcactcagcttctgccggtgaagagaaaactgggtttctacgaagctaccagcaggctccgatcccacatcaaccctacaggaaccgtcctcttgcagctggagaatacgatgcagacttcactgaaggacctcctg

SEQ ID NO: 1432 - protein, 398 aa, Artificial Sequence
  variant of human alpha-galactosidase A
LDNGLARTPPMGWLHWERFMCNLDCQEEPDSCISEKLFEEMAERMVTEGWKDAGYEYLCIDDCWMAPQRDSEGRLQADPQRFPHGIRQLANHVHSKGLKLGIYADVGNKTCAGFPGSFGYYDIDAQTFADWGVDLLKFDGCYCDSLENLADGYKHMSLALNRTGRPIVYSCEWPLYMWPFQKPNYTEIRQYCNHWRNFADIDDSWASIKSILDWTSRNQERIVDVAGPGGWNDPDMLVIGNFGLSWDQQVTQMALWAIMAGPLFMSNDLRAISPQAKALLQDKDVIAINQDPLGKQGYQLRNGDNFEVWERPLSGDAWAVAIINRQEIGGPRSYTIPVASLGKGVACNPACFITQLLPVKRKLGFYEATSRLRSHINPTGTVLLQLENTMQTSLKDLL

SEQ ID NO: 1433 - DNA, 1194 bp, Artificial Sequence
  variant of human alpha-galactosidase A
ctggataatggattggctagaacacctcctatggggtggcttcactgggagaggttcatgtgcaacctggactgtcaggaagaaccagacagctgcatctccgagaagctctttgaggaaatggccgaacgaatggtgactgagggctggaaagatgcaggttacgagtatctgtgtattgacgattgctggatggccccacaacgggattctgagggaagacttcaggctgatccgcagcgcttccctcatggcataaggcagctggcaaaccacgtccacagtaaggggctcaaattgggaatctacgcggacgtgggcaataagacctgtgccggttttccgggatcattcgggtattatgacattgacgcccaaacgtttgctgattggggcgttgacctgctgaaattcgatggttgctactgtgacagcctcgaaaacctggcagacggctacaagcatatgtctctcgccctgaatagaaccggtcggccaatcgtatattcctgcgagtggcctctttacatgtggccatttcagaaaccgaactacacagaaattcgccagtattgcaatcattggaggaacttcgctgatatcgatgactcatgggcctccataaagagcatcttggactggaccagtcggaatcaggagcgaattgtggatgtcgcaggccctggaggatggaacgatccagacatgctggtgatcggcaattttggcctctcttgggaccagcaggttacccaaatggctctgtgggcaattatggccggtcctcttttcatgagcaacgatctgcgcgcgatctcaccacaggcaaaggccctgctccaagacaaagatgtgatagccatcaatcaggacccgttgggaaagcagggctaccagctgagaccgggcgacaactttgaggtctgggaaaggcctttgagtggagatgcgtgggctgtggccattattaatcggcaagagatcggaggtccacgctcctatacaattcctgtagcatctcttggcaagggcgttgcctgtaacccagcttgcttcatcactcagcttctgccggtgaagagaaaactgggtttctacgaagctaccagcaggctccgatcccacatcaaccctacaggaaccgtcctcttgcagctggagaatacgatgcagacttcactgaaggacctcctg

SEQ ID NO: 1434 - protein, 398 aa, Artificial Sequence
  variant of human alpha-galactosidase A
LDNGLARTPPMGWLHWERFMCNLDCQEEPDSCISEKLFEEMAERMVTEGWKDAGYEYLCIDDCWMAPQRDSEGRLQADPQRFPHGIRQLANHVHSKGLKLGIYADVGNKTCAGFPGSFGYYDIDAQTFADWGVDLLKFDGCYCDSLENLADGYKHMSLALNRTGRPIVYSCEWPLYMWPFQKPNYTEIRQYCNHWRNFADIDDSWASIKSILDWTSRNQERIVDVAGPGGWNDPDMLVIGNFGLSWDQQVTQMALWAIMAGPLFMSNDLRAISPQAKALLQDKDVIAINQDPLGKQGYQLRPGDNFEVWERPLSGDAWAVAIINRQEIGGPRSYTIPVASLGKGVACNPACFITQLLPVKRKLGFYEATSRLRSHINPTGTVLLQLENTMQTSLKDLL

SEQ ID NO: 1435 - DNA, 1194 bp, Artificial Sequence
  variant of human alpha-galactosidase A
ctggataatggattggctagaacacctcctatggggtggcttcactgggagaggttcatgtgcaacctggactgtcaggaagaaccagacagctgcatctccgagaagctctttgaggaaatggccgaacgaatggtgactgagggctggaaagatgcaggttacgagtatctgtgtattgacgattgctggatggccccacaacgggattctgagggaagacttcaggctgatccgcagcgcttccctcatggcataaggcagctggcaaaccacgtccacagtaaggggctcaaattgggaatctacgcggacgtgggcaataagacctgtgccggttttccgggatcattcgggtattatgacattgacgcccaaacgtttgctgattggggcgttgacctgctgaaattcgatggttgctactgtgacagcctcgaaaacctggcagacggctacaagcatatgtctctcgccctgaatagaaccggtcggccaatcgtatattcctgcgagtggcctctttacatgtggccatttcagaaaccgaactacacagaaattcgccagtattgcaatcattggaggaacttcgctgatatcgatgactcatgggcctccataaagagcatcttggactggaccagtcggaatcaggagcgaattgtggatgtcgcaggccctggaggatggaacgatccagacatgctggtgatcggcaattttggcctctcttgggaccagcaggttacccaaatggctctgtgggcaattatggccggtcctcttttcatgagcaacgatctgcgcgcgatctcaccacaggcaaaggccctgctccaagacaaagatgtgatagccatcaatcaggacccgttgggaaagcagggctaccagctgagacagggcgacaactttgaggtctgggaaaggcctttgagtggagatgcgtgggctgtggccattattaatcggcaagagatcggaggtccacgctcctatacaattcctgtagcatctcttggcaagggcgttgcctgtaacccagcttgcttcatcactcagcttctgccggtgaagagaaaactgggtttctacgaagctaccagcaggctccgatcccacatcaaccctacaggaaccgtcctcttgcagctggagaatacgatgcagacttcactgaaggacctcctg

SEQ ID NO: 1436 - protein, 398 aa, Artificial Sequence
  variant of human alpha-galactosidase A
LDNGLARTPPMGWLHWERFMCNLDCQEEPDSCISEKLFEEMAERMVTEGWKDAGYEYLCIDDCWMAPQRDSEGRLQADPQRFPHGIRQLANHVHSKGLKLGIYADVGNKTCAGFPGSFGYYDIDAQTFADWGVDLLKFDGCYCDSLENLADGYKHMSLALNRTGRPIVYSCEWPLYMWPFQKPNYTEIRQYCNHWRNFADIDDSWASIKSILDWTSRNQERIVDVAGPGGWNDPDMLVIGNFGLSWDQQVTQMALWAIMAGPLFMSNDLRAISPQAKALLQDKDVIAINQDPLGKQGYQLRQGDNFEVWERPLSGDAWAVAIINRQEIGGPRSYTIPVASLGKGVACNPACFITQLLPVKRKLGFYEATSRLRSHINPTGTVLLQLENTMQTSLKDLL

SEQ ID NO: 1437 - DNA, 1194 bp, Artificial Sequence
  variant of human alpha-galactosidase A
ctggataatggattggctagaacacctcctatggggtggcttcactgggagaggttcatgtgcaacctggactgtcaggaagaaccagacagctgcatctccgagaagctctttgaggaaatggccgaacgaatggtgactgagggctggaaagatgcaggttacgagtatctgtgtattgacgattgctggatggccccacaacgggattctgagggaagacttcaggctgatccgcagcgcttccctcatggcataaggcagctggcaaaccacgtccacagtaaggggctcaaattgggaatctacgcggacgtgggcaataagacctgtgccggttttccgggatcattcgggtattatgacattgacgcccaaacgtttgctgattggggcgttgacctgctgaaattcgatggttgctactgtgacagcctcgaaaacctggcagacggctacaagcatatgtctctcgccctgaatagaaccggtcggccaatcgtatattcctgcgagtggcctctttacatgtggccatttcagaaaccgaactacacagaaattcgccagtattgcaatcattggaggaacttcgctgatatcgatgactcatgggcctccataaagagcatcttggactggaccagtcggaatcaggagcgaattgtggatgtcgcaggccctggaggatggaacgatccagacatgctggtgatcggcaattttggcctctcttgggaccagcaggttacccaaatggctctgtgggcaattatggccggtcctcttttcatgagcaacgatctgcgcgcgatctcaccacaggcaaaggccctgctccaagacaaagatgtgatagccatcaatcaggacccgttgggaaagcagggctaccagctgagaaggggcgacaactttgaggtctgggaaaggcctttgagtggagatgcgtgggctgtggccattattaatcggcaagagatcggaggtccacgctcctatacaattcctgtagcatctcttggcaagggcgttgcctgtaacccagcttgcttcatcactcagcttctgccggtgaagagaaaactgggtttctacgaagctaccagcaggctccgatcccacatcaaccctacaggaaccgtcctcttgcagctggagaatacgatgcagacttcactgaaggacctcctg

SEQ ID NO: 1438 - protein, 398 aa, Artificial Sequence
  variant of human alpha-galactosidase A
LDNGLARTPPMGWLHWERFMCNLDCQEEPDSCISEKLFEEMAERMVTEGWKDAGYEYLCIDDCWMAPQRDSEGRLQADPQRFPHGIRQLANHVHSKGLKLGIYADVGNKTCAGFPGSFGYYDIDAQTFADWGVDLLKFDGCYCDSLENLADGYKHMSLALNRTGRPIVYSCEWPLYMWPFQKPNYTEIRQYCNHWRNFADIDDSWASIKSILDWTSRNQERIVDVAGPGGWNDPDMLVIGNFGLSWDQQVTQMALWAIMAGPLFMSNDLRAISPQAKALLQDKDVIAINQDPLGKQGYQLRRGDNFEVWERPLSGDAWAVAIINRQEIGGPRSYTIPVASLGKGVACNPACFITQLLPVKRKLGFYEATSRLRSHINPTGTVLLQLENTMQTSLKDLL

SEQ ID NO: 1439 - DNA, 1194 bp, Artificial Sequence
  variant of human alpha-galactosidase A
ctggataatggattggctagaacacctcctatggggtggcttcactgggagaggttcatgtgcaacctggactgtcaggaagaaccagacagctgcatctccgagaagctctttgaggaaatggccgaacgaatggtgactgagggctggaaagatgcaggttacgagtatctgtgtattgacgattgctggatggccccacaacgggattctgagggaagacttcaggctgatccgcagcgcttccctcatggcataaggcagctggcaaaccacgtccacagtaaggggctcaaattgggaatctacgcggacgtgggcaataagacctgtgccggttttccgggatcattcgggtattatgacattgacgcccaaacgtttgctgattggggcgttgacctgctgaaattcgatggttgctactgtgacagcctcgaaaacctggcagacggctacaagcatatgtctctcgccctgaatagaaccggtcggccaatcgtatattcctgcgagtggcctctttacatgtggccatttcagaaaccgaactacacagaaattcgccagtattgcaatcattggaggaacttcgctgatatcgatgactcatgggcctccataaagagcatcttggactggaccagtcggaatcaggagcgaattgtggatgtcgcaggccctggaggatggaacgatccagacatgctggtgatcggcaattttggcctctcttgggaccagcaggttacccaaatggctctgtgggcaattatggccggtcctcttttcatgagcaacgatctgcgcgcgatctcaccacaggcaaaggccctgctccaagacaaagatgtgatagccatcaatcaggacccgttgggaaagcagggctaccagctgagatctggcgacaactttgaggtctgggaaaggcctttgagtggagatgcgtgggctgtggccattattaatcggcaagagatcggaggtccacgctcctatacaattcctgtagcatctcttggcaagggcgttgcctgtaacccagcttgcttcatcactcagcttctgccggtgaagagaaaactgggtttctacgaagctaccagcaggctccgatcccacatcaaccctacaggaaccgtcctcttgcagctggagaatacgatgcagacttcactgaaggacctcctg

SEQ ID NO: 1440 - protein, 398 aa, Artificial Sequence
  variant of human alpha-galactosidase A
LDNGLARTPPMGWLHWERFMCNLDCQEEPDSCISEKLFEEMAERMVTEGWKDAGYEYLCIDDCWMAPQRDSEGRLQADPQRFPHGIRQLANHVHSKGLKLGIYADVGNKTCAGFPGSFGYYDIDAQTFADWGVDLLKFDGCYCDSLENLADGYKHMSLALNRTGRPIVYSCEWPLYMWPFQKPNYTEIRQYCNHWRNFADIDDSWASIKSILDWTSRNQERIVDVAGPGGWNDPDMLVIGNFGLSWDQQVTQMALWAIMAGPLFMSNDLRAISPQAKALLQDKDVIAINQDPLGKQGYQLRSGDNFEVWERPLSGDAWAVAIINRQEIGGPRSYTIPVASLGKGVACNPACFITQLLPVKRKLGFYEATSRLRSHINPTGTVLLQLENTMQTSLKDLL

SEQ ID NO: 1441 - DNA, 1194 bp, Artificial Sequence
  variant of human alpha-galactosidase A
ctggataatggattggctagaacacctcctatggggtggcttcactgggagaggttcatgtgcaacctggactgtcaggaagaaccagacagctgcatctccgagaagctctttgaggaaatggccgaacgaatggtgactgagggctggaaagatgcaggttacgagtatctgtgtattgacgattgctggatggccccacaacgggattctgagggaagacttcaggctgatccgcagcgcttccctcatggcataaggcagctggcaaaccacgtccacagtaaggggctcaaattgggaatctacgcggacgtgggcaataagacctgtgccggttttccgggatcattcgggtattatgacattgacgcccaaacgtttgctgattggggcgttgacctgctgaaattcgatggttgctactgtgacagcctcgaaaacctggcagacggctacaagcatatgtctctcgccctgaatagaaccggtcggccaatcgtatattcctgcgagtggcctctttacatgtggccatttcagaaaccgaactacacagaaattcgccagtattgcaatcattggaggaacttcgctgatatcgatgactcatgggcctccataaagagcatcttggactggaccagtcggaatcaggagcgaattgtggatgtcgcaggccctggaggatggaacgatccagacatgctggtgatcggcaattttggcctctcttgggaccagcaggttacccaaatggctctgtgggcaattatggccggtcctcttttcatgagcaacgatctgcgcgcgatctcaccacaggcaaaggccctgctccaagacaaagatgtgatagccatcaatcaggacccgttgggaaagcagggctaccagctgagaactggcgacaactttgaggtctgggaaaggcctttgagtggagatgcgtgggctgtggccattattaatcggcaagagatcggaggtccacgctcctatacaattcctgtagcatctcttggcaagggcgttgcctgtaacccagcttgcttcatcactcagcttctgccggtgaagagaaaactgggtttctacgaagctaccagcaggctccgatcccacatcaaccctacaggaaccgtcctcttgcagctggagaatacgatgcagacttcactgaaggacctcctg

SEQ ID NO: 1442 - protein, 398 aa, Artificial Sequence
  variant of human alpha-galactosidase A
LDNGLARTPPMGWLHWERFMCNLDCQEEPDSCISEKLFEEMAERMVTEGWKDAGYEYLCIDDCWMAPQRDSEGRLQADPQRFPHGIRQLANHVHSKGLKLGIYADVGNKTCAGFPGSFGYYDIDAQTFADWGVDLLKFDGCYCDSLENLADGYKHMSLALNRTGRPIVYSCEWPLYMWPFQKPNYTEIRQYCNHWRNFADIDDSWASIKSILDWTSRNQERIVDVAGPGGWNDPDMLVIGNFGLSWDQQVTQMALWAIMAGPLFMSNDLRAISPQAKALLQDKDVIAINQDPLGKQGYQLRTGDNFEVWERPLSGDAWAVAIINRQEIGGPRSYTIPVASLGKGVACNPACFITQLLPVKRKLGFYEATSRLRSHINPTGTVLLQLENTMQTSLKDLL

SEQ ID NO: 1443 - DNA, 1194 bp, Artificial Sequence
  variant of human alpha-galactosidase A
ctggataatggattggctagaacacctcctatggggtggcttcactgggagaggttcatgtgcaacctggactgtcaggaagaaccagacagctgcatctccgagaagctctttgaggaaatggccgaacgaatggtgactgagggctggaaagatgcaggttacgagtatctgtgtattgacgattgctggatggccccacaacgggattctgagggaagacttcaggctgatccgcagcgcttccctcatggcataaggcagctggcaaaccacgtccacagtaaggggctcaaattgggaatctacgcggacgtgggcaataagacctgtgccggttttccgggatcattcgggtattatgacattgacgcccaaacgtttgctgattggggcgttgacctgctgaaattcgatggttgctactgtgacagcctcgaaaacctggcagacggctacaagcatatgtctctcgccctgaatagaaccggtcggccaatcgtatattcctgcgagtggcctctttacatgtggccatttcagaaaccgaactacacagaaattcgccagtattgcaatcattggaggaacttcgctgatatcgatgactcatgggcctccataaagagcatcttggactggaccagtcggaatcaggagcgaattgtggatgtcgcaggccctggaggatggaacgatccagacatgctggtgatcggcaattttggcctctcttgggaccagcaggttacccaaatggctctgtgggcaattatggccggtcctcttttcatgagcaacgatctgcgcgcgatctcaccacaggcaaaggccctgctccaagacaaagatgtgatagccatcaatcaggacccgttgggaaagcagggctaccagctgagagtgggcgacaactttgaggtctgggaaaggcctttgagtggagatgcgtgggctgtggccattattaatcggcaagagatcggaggtccacgctcctatacaattcctgtagcatctcttggcaagggcgttgcctgtaacccagcttgcttcatcactcagcttctgccggtgaagagaaaactgggtttctacgaagctaccagcaggctccgatcccacatcaaccctacaggaaccgtcctcttgcagctggagaatacgatgcagacttcactgaaggacctcctg

SEQ ID NO: 1444 - protein, 398 aa, Artificial Sequence
  variant of human alpha-galactosidase A
LDNGLARTPPMGWLHWERFMCNLDCQEEPDSCISEKLFEEMAERMVTEGWKDAGYEYLCIDDCWMAPQRDSEGRLQADPQRFPHGIRQLANHVHSKGLKLGIYADVGNKTCAGFPGSFGYYDIDAQTFADWGVDLLKFDGCYCDSLENLADGYKHMSLALNRTGRPIVYSCEWPLYMWPFQKPNYTEIRQYCNHWRNFADIDDSWASIKSILDWTSRNQERIVDVAGPGGWNDPDMLVIGNFGLSWDQQVTQMALWAIMAGPLFMSNDLRAISPQAKALLQDKDVIAINQDPLGKQGYQLRVGDNFEVWERPLSGDAWAVAIINRQEIGGPRSYTIPVASLGKGVACNPACFITQLLPVKRKLGFYEATSRLRSHINPTGTVLLQLENTMQTSLKDLL

SEQ ID NO: 1445 - DNA, 1194 bp, Artificial Sequence
  variant of human alpha-galactosidase A
ctggataatggattggctagaacacctcctatggggtggcttcactgggagaggttcatgtgcaacctggactgtcaggaagaaccagacagctgcatctccgagaagctctttgaggaaatggccgaacgaatggtgactgagggctggaaagatgcaggttacgagtatctgtgtattgacgattgctggatggccccacaacgggattctgagggaagacttcaggctgatccgcagcgcttccctcatggcataaggcagctggcaaaccacgtccacagtaaggggctcaaattgggaatctacgcggacgtgggcaataagacctgtgccggttttccgggatcattcgggtattatgacattgacgcccaaacgtttgctgattggggcgttgacctgctgaaattcgatggttgctactgtgacagcctcgaaaacctggcagacggctacaagcatatgtctctcgccctgaatagaaccggtcggccaatcgtatattcctgcgagtggcctctttacatgtggccatttcagaaaccgaactacacagaaattcgccagtattgcaatcattggaggaacttcgctgatatcgatgactcatgggcctccataaagagcatcttggactggaccagtcggaatcaggagcgaattgtggatgtcgcaggccctggaggatggaacgatccagacatgctggtgatcggcaattttggcctctcttgggaccagcaggttacccaaatggctctgtgggcaattatggccggtcctcttttcatgagcaacgatctgcgcgcgatctcaccacaggcaaaggccctgctccaagacaaagatgtgatagccatcaatcaggacccgttgggaaagcagggctaccagctgagatggggcgacaactttgaggtctgggaaaggcctttgagtggagatgcgtgggctgtggccattattaatcggcaagagatcggaggtccacgctcctatacaattcctgtagcatctcttggcaagggcgttgcctgtaacccagcttgcttcatcactcagcttctgccggtgaagagaaaactgggtttctacgaagctaccagcaggctccgatcccacatcaaccctacaggaaccgtcctcttgcagctggagaatacgatgcagacttcactgaaggacctcctg

SEQ ID NO: 1446 - protein, 398 aa, Artificial Sequence
  variant of human alpha-galactosidase A
LDNGLARTPPMGWLHWERFMCNLDCQEEPDSCISEKLFEEMAERMVTEGWKDAGYEYLCIDDCWMAPQRDSEGRLQADPQRFPHGIRQLANHVHSKGLKLGIYADVGNKTCAGFPGSFGYYDIDAQTFADWGVDLLKFDGCYCDSLENLADGYKHMSLALNRTGRPIVYSCEWPLYMWPFQKPNYTEIRQYCNHWRNFADIDDSWASIKSILDWTSRNQERIVDVAGPGGWNDPDMLVIGNFGLSWDQQVTQMALWAIMAGPLFMSNDLRAISPQAKALLQDKDVIAINQDPLGKQGYQLRWGDNFEVWERPLSGDAWAVAIINRQEIGGPRSYTIPVASLGKGVACNPACFITQLLPVKRKLGFYEATSRLRSHINPTGTVLLQLENTMQTSLKDLL

SEQ ID NO: 1447 - DNA, 1194 bp, Artificial Sequence
  variant of human alpha-galactosidase A
ctggataatggattggctagaacacctcctatggggtggcttcactgggagaggttcatgtgcaacctggactgtcaggaagaaccagacagctgcatctccgagaagctctttgaggaaatggccgaacgaatggtgactgagggctggaaagatgcaggttacgagtatctgtgtattgacgattgctggatggccccacaacgggattctgagggaagacttcaggctgatccgcagcgcttccctcatggcataaggcagctggcaaaccacgtccacagtaaggggctcaaattgggaatctacgcggacgtgggcaataagacctgtgccggttttccgggatcattcgggtattatgacattgacgcccaaacgtttgctgattggggcgttgacctgctgaaattcgatggttgctactgtgacagcctcgaaaacctggcagacggctacaagcatatgtctctcgccctgaatagaaccggtcggccaatcgtatattcctgcgagtggcctctttacatgtggccatttcagaaaccgaactacacagaaattcgccagtattgcaatcattggaggaacttcgctgatatcgatgactcatgggcctccataaagagcatcttggactggaccagtcggaatcaggagcgaattgtggatgtcgcaggccctggaggatggaacgatccagacatgctggtgatcggcaattttggcctctcttgggaccagcaggttacccaaatggctctgtgggcaattatggccggtcctcttttcatgagcaacgatctgcgcgcgatctcaccacaggcaaaggccctgctccaagacaaagatgtgatagccatcaatcaggacccgttgggaaagcagggctaccagctgagatatggcgacaactttgaggtctgggaaaggcctttgagtggagatgcgtgggctgtggccattattaatcggcaagagatcggaggtccacgctcctatacaattcctgtagcatctcttggcaagggcgttgcctgtaacccagcttgcttcatcactcagcttctgccggtgaagagaaaactgggtttctacgaagctaccagcaggctccgatcccacatcaaccctacaggaaccgtcctcttgcagctggagaatacgatgcagacttcactgaaggacctcctg

SEQ ID NO: 1448 - protein, 398 aa, Artificial Sequence
  variant of human alpha-galactosidase A
LDNGLARTPPMGWLHWERFMCNLDCQEEPDSCISEKLFEEMAERMVTEGWKDAGYEYLCIDDCWMAPQRDSEGRLQADPQRFPHGIRQLANHVHSKGLKLGIYADVGNKTCAGFPGSFGYYDIDAQTFADWGVDLLKFDGCYCDSLENLADGYKHMSLALNRTGRPIVYSCEWPLYMWPFQKPNYTEIRQYCNHWRNFADIDDSWASIKSILDWTSRNQERIVDVAGPGGWNDPDMLVIGNFGLSWDQQVTQMALWAIMAGPLFMSNDLRAISPQAKALLQDKDVIAINQDPLGKQGYQLRYGDNFEVWERPLSGDAWAVAIINRQEIGGPRSYTIPVASLGKGVACNPACFITQLLPVKRKLGFYEATSRLRSHINPTGTVLLQLENTMQTSLKDLL

SEQ ID NO: 1449 - DNA, 1194 bp, Artificial Sequence
  variant of human alpha-galactosidase A
ctggataatggattggctagaacacctgctatggggtggcttcactgggagaggttcatgtgcaacctggactgtcaggaagaaccagacagctgcatctccgagaagctctttgaggaaatggccgaacgaatggtgactgagggctggaaagatgcaggttacgagtatctgtgtattgacgattgctggatggccccacaacgggattctgagggaagacttcaggctgatccgcagcgcttccctcatggcataaggcagctggcaaaccacgtccacagtaaggggctcaaattgggaatctacgcggacgtgggcaataagacctgtgccggttttccgggatcattcgggtattatgacattgacgcccaaacgtttgctgattggggcgttgacctgctgaaattcgatggttgctactgtgacagcctcgaaaacctggcagacggctacaagcatatgtctctcgccctgaatagaaccggtcggccaatcgtatattcctgcgagtggcctctttacatgtggccatttcagaaaccgaactacacagaaattcgccagtattgcaatcattggaggaacttcgctgatatcgatgactcatgggcctccataaagagcatcttggactggaccagtcggaatcaggagcgaattgtggatgtcgcaggccctggaggatggaacgatccagacatgctggtgatcggcaattttggcctctcttgggaccagcaggttacccaaatggctctgtgggcaattatggccggtcctcttttcatgagcaacgatctgcgcgcgatctcaccacaggcaaaggccctgctccaagacaaagatgtgatagccatcaatcaggacccgttgggaaagcagggctaccagctgagaaaaggcgacaactttgaggtctgggaaaggcctttgagtggagatgcgtgggctgtggccattattaatcggcaagagatcggaggtccacgctcctatacaattcctgtagcatctcttggcaagggcgttgcctgtaacccagcttgcttcatcactcagcttctgccggtgaagagaaaactgggtttctacgaagctaccagcaggctccgatcccacatcaaccctacaggaaccgtcctcttgcagctggagaatacgatgcagacttcactgaaggacctcctg

SEQ ID NO: 1450 - protein, 398 aa, Artificial Sequence
  variant of human alpha-galactosidase A
LDNGLARTPAMGWLHWERFMCNLDCQEEPDSCISEKLFEEMAERMVTEGWKDAGYEYLCIDDCWMAPQRDSEGRLQADPQRFPHGIRQLANHVHSKGLKLGIYADVGNKTCAGFPGSFGYYDIDAQTFADWGVDLLKFDGCYCDSLENLADGYKHMSLALNRTGRPIVYSCEWPLYMWPFQKPNYTEIRQYCNHWRNFADIDDSWASIKSILDWTSRNQERIVDVAGPGGWNDPDMLVIGNFGLSWDQQVTQMALWAIMAGPLFMSNDLRAISPQAKALLQDKDVIAINQDPLGKQGYQLRKGDNFEVWERPLSGDAWAVAIINRQEIGGPRSYTIPVASLGKGVACNPACFITQLLPVKRKLGFYEATSRLRSHINPTGTVLLQLENTMQTSLKDLL

SEQ ID NO: 1451 - DNA, 1194 bp, Artificial Sequence
  variant of human alpha-galactosidase A
ctggataatggattggctagaacaccttgtatggggtggcttcactgggagaggttcatgtgcaacctggactgtcaggaagaaccagacagctgcatctccgagaagctctttgaggaaatggccgaacgaatggtgactgagggctggaaagatgcaggttacgagtatctgtgtattgacgattgctggatggccccacaacgggattctgagggaagacttcaggctgatccgcagcgcttccctcatggcataaggcagctggcaaaccacgtccacagtaaggggctcaaattgggaatctacgcggacgtgggcaataagacctgtgccggttttccgggatcattcgggtattatgacattgacgcccaaacgtttgctgattggggcgttgacctgctgaaattcgatggttgctactgtgacagcctcgaaaacctggcagacggctacaagcatatgtctctcgccctgaatagaaccggtcggccaatcgtatattcctgcgagtggcctctttacatgtggccatttcagaaaccgaactacacagaaattcgccagtattgcaatcattggaggaacttcgctgatatcgatgactcatgggcctccataaagagcatcttggactggaccagtcggaatcaggagcgaattgtggatgtcgcaggccctggaggatggaacgatccagacatgctggtgatcggcaattttggcctctcttgggaccagcaggttacccaaatggctctgtgggcaattatggccggtcctcttttcatgagcaacgatctgcgcgcgatctcaccacaggcaaaggccctgctccaagacaaagatgtgatagccatcaatcaggacccgttgggaaagcagggctaccagctgagaaaaggcgacaactttgaggtctgggaaaggcctttgagtggagatgcgtgggctgtggccattattaatcggcaagagatcggaggtccacgctcctatacaattcctgtagcatctcttggcaagggcgttgcctgtaacccagcttgcttcatcactcagcttctgccggtgaagagaaaactgggtttctacgaagctaccagcaggctccgatcccacatcaaccctacaggaaccgtcctcttgcagctggagaatacgatgcagacttcactgaaggacctcctg

SEQ ID NO: 1452 - protein, 398 aa, Artificial Sequence
  variant of human alpha-galactosidase A
LDNGLARTPCMGWLHWERFMCNLDCQEEPDSCISEKLFEEMAERMVTEGWKDAGYEYLCIDDCWMAPQRDSEGRLQADPQRFPHGIRQLANHVHSKGLKLGIYADVGNKTCAGFPGSFGYYDIDAQTFADWGVDLLKFDGCYCDSLENLADGYKHMSLALNRTGRPIVYSCEWPLYMWPFQKPNYTEIRQYCNHWRNFADIDDSWASIKSILDWTSRNQERIVDVAGPGGWNDPDMLVIGNFGLSWDQQVTQMALWAIMAGPLFMSNDLRAISPQAKALLQDKDVIAINQDPLGKQGYQLRKGDNFEVWERPLSGDAWAVAIINRQEIGGPRSYTIPVASLGKGVACNPACFITQLLPVKRKLGFYEATSRLRSHINPTGTVLLQLENTMQTSLKDLL

SEQ ID NO: 1453 - DNA, 1194 bp, Artificial Sequence
  variant of human alpha-galactosidase A
ctggataatggattggctagaacacctgatatggggtggcttcactgggagaggttcatgtgcaacctggactgtcaggaagaaccagacagctgcatctccgagaagctctttgaggaaatggccgaacgaatggtgactgagggctggaaagatgcaggttacgagtatctgtgtattgacgattgctggatggccccacaacgggattctgagggaagacttcaggctgatccgcagcgcttccctcatggcataaggcagctggcaaaccacgtccacagtaaggggctcaaattgggaatctacgcggacgtgggcaataagacctgtgccggttttccgggatcattcgggtattatgacattgacgcccaaacgtttgctgattggggcgttgacctgctgaaattcgatggttgctactgtgacagcctcgaaaacctggcagacggctacaagcatatgtctctcgccctgaatagaaccggtcggccaatcgtatattcctgcgagtggcctctttacatgtggccatttcagaaaccgaactacacagaaattcgccagtattgcaatcattggaggaacttcgctgatatcgatgactcatgggcatccataaagagcatcttggactggaccagtcggaatcaggagcgaattgtggatgtcgcaggccctggaggatggaacgatccagacatgctggtgatcggcaattttggcctctcttgggaccagcaggttacccaaatggctctgtgggcaattatggccggtcctcttttcatgagcaacgatctgcgcgcgatctcaccacaggcaaaggccctgctccaagacaaagatgtgatagccatcaatcaggacccgttgggaaagcagggctaccagctgagaaaaggcgacaactttgaggtctgggaaaggcctttgagtggagatgcgtgggctgtggccattattaatcggcaagagatcggaggtccacgctcctatacaattcctgtagcatctcttggcaagggcgttgcctgtaacccagcttgcttcatcactcagcttctgccggtgaagagaaaactgggtttctacgaagctaccagcaggctccgatcccacatcaaccctacaggaaccgtcctcttgcagctggagaatacgatgcagacttcactgaaggacctcctg

SEQ ID NO: 1454 - protein, 398 aa, Artificial Sequence
  variant of human alpha-galactosidase A
LDNGLARTPDMGWLHWERFMCNLDCQEEPDSCISEKLFEEMAERMVTEGWKDAGYEYLCIDDCWMAPQRDSEGRLQADPQRFPHGIRQLANHVHSKGLKLGIYADVGNKTCAGFPGSFGYYDIDAQTFADWGVDLLKFDGCYCDSLENLADGYKHMSLALNRTGRPIVYSCEWPLYMWPFQKPNYTEIRQYCNHWRNFADIDDSWASIKSILDWTSRNQERIVDVAGPGGWNDPDMLVIGNFGLSWDQQVTQMALWAIMAGPLFMSNDLRAISPQAKALLQDKDVIAINQDPLGKQGYQLRKGDNFEVWERPLSGDAWAVAIINRQEIGGPRSYTIPVASLGKGVACNPACFITQLLPVKRKLGFYEATSRLRSHINPTGTVLLQLENTMQTSLKDLL

SEQ ID NO: 1455 - DNA, 1194 bp, Artificial Sequence
  variant of human alpha-galactosidase A
ctggataatggattggctagaacacctgagatggggtggcttcactgggagaggttcatgtgcaacctggactgtcaggaagaaccagacagctgcatctccgagaagctctttgaggaaatggccgaacgaatggtgactgagggctggaaagatgcaggttacgagtatctgtgtattgacgattgctggatggccccacaacgggattctgagggaagacttcaggctgatccgcagcgcttccctcatggcataaggcagctggcaaaccacgtccacagtaaggggctcaaattgggaatctacgcggacgtgggcaataagacctgtgccggttttccgggatcattcgggtattatgacattgacgcccaaacgtttgctgattggggcgttgacctgctgaaattcgatggttgctactgtgacagcctcgaaaacctggcagacggctacaagcatatgtctctcgccctgaatagaaccggtcggccaatcgtatattcctgcgagtggcctctttacatgtggccatttcagaaaccgaactacacagaaattcgccagtattgcaatcattggaggaacttcgctgatatcgatgactcatgggcctccataaagagcatcttggactggaccagtcggaatcaggagcgaattgtggatgtcgcaggccctggaggatggaacgatccagacatgctggtgatcggcaattttggcctctcttgggaccagcaggttacccaaatggctctgtgggcaattatggccggtcctcttttcatgagcaacgatctgcgcgcgatctcaccacaggcaaaggccctgctccaagacaaagatgtgatagccatcaatcaggacccgttgggaaagcagggctaccagctgagaaaaggcgacaactttgaggtctgggaaaggcctttgagtggagatgcgtgggctgtggccattattaatcggcaagagatcggaggtccacgctcctatacaattcctgtagcatctcttggcaagggcgttgcctgtaacccagcttgcttcatcactcagcttctgccggtgaagagaaaactgggtttctacgaagctaccagcaggctccgatcccacatcaaccctacaggaaccgtcctcttgcagctggagaatacgatgcagacttcactgaaggacctcctg

SEQ ID NO: 1456 - protein, 398 aa, Artificial Sequence
  variant of human alpha-galactosidase A
LDNGLARTPEMGWLHWERFMCNLDCQEEPDSCISEKLFEEMAERMVTEGWKDAGYEYLCIDDCWMAPQRDSEGRLQADPQRFPHGIRQLANHVHSKGLKLGIYADVGNKTCAGFPGSFGYYDIDAQTFADWGVDLLKFDGCYCDSLENLADGYKHMSLALNRTGRPIVYSCEWPLYMWPFQKPNYTEIRQYCNHWRNFADIDDSWASIKSILDWTSRNQERIVDVAGPGGWNDPDMLVIGNFGLSWDQQVTQMALWAIMAGPLFMSNDLRAISPQAKALLQDKDVIAINQDPLGKQGYQLRKGDNFEVWERPLSGDAWAVAIINRQEIGGPRSYTIPVASLGKGVACNPACFITQLLPVKRKLGFYEATSRLRSHINPTGTVLLQLENTMQTSLKDLL

SEQ ID NO: 1457 - DNA, 1194 bp, Artificial Sequence
  variant of human alpha-galactosidase A
ctggataatggattggctagaacaccttttatggggtggcttcactgggagaggttcatgtgcaacctggactgtcaggaagaaccagacagctgcatctccgagaagctctttgaggaaatggccgaacgaatggtgactgagggctggaaagatgcaggttacgagtatctgtgtattgacgattgctggatggccccacaacgggattctgagggaagacttcaggctgatccgcagcgcttccctcatggcataaggcagctggcaaaccacgtccacagtaaggggctcaaattgggaatctacgcggacgtgggcaataagacctgtgccggttttccgggatcattcgggtattatgacattgacgcccaaacgtttgctgattggggcgttgacctgctgaaattcgatggttgctactgtgacagcctcgaaaacctggcagacggctacaagcatatgtctctcgccctgaatagaaccggtcggccaatcgtatattcctgcgagtggcctctttacatgtggccatttcagaaaccgaactacacagaaattcgccagtattgcaatcattggaggaacttcgctgatatcgatgactcatgggcctccataaagagcatcttggactggaccagtcggaatcaggagcgaattgtggatgtcgcaggccctggaggatggaacgatccagacatgctggtgatcggcaattttggcctctcttgggaccagcaggttacccaaatggctctgtgggcaattatggccggtcctcttttcatgagcaacgatctgcgcgcgatctcaccacaggcaaaggccctgctccaagacaaagatgtgatagccatcaatcaggacccgttgggaaagcagggctaccagctgagaaaaggcgacaactttgaggtctgggaaaggcctttgagtggagatgcgtgggctgtggccattattaatcggcaagagatcggaggtccacgctcctatacaattcctgtagcatctcttggcaagggcgttgcctgtaacccagcttgcttcatcactcagcttctgccggtgaagagaaaactgggtttctacgaagctaccagcaggctccgatcccacatcaaccctacaggaaccgtcctcttgcagctggagaatacgatgcagacttcactgaaggacctcctg

SEQ ID NO: 1458 - protein, 398 aa, Artificial Sequence
  variant of human alpha-galactosidase A
LDNGLARTPFMGWLHWERFMCNLDCQEEPDSCISEKLFEEMAERMVTEGWKDAGYEYLCIDDCWMAPQRDSEGRLQADPQRFPHGIRQLANHVHSKGLKLGIYADVGNKTCAGFPGSFGYYDIDAQTFADWGVDLLKFDGCYCDSLENLADGYKHMSLALNRTGRPIVYSCEWPLYMWPFQKPNYTEIRQYCNHWRNFADIDDSWASIKSILDWTSRNQERIVDVAGPGGWNDPDMLVIGNFGLSWDQQVTQMALWAIMAGPLFMSNDLRAISPQAKALLQDKDVIAINQDPLGKQGYQLRKGDNFEVWERPLSGDAWAVAIINRQEIGGPRSYTIPVASLGKGVACNPACFITQLLPVKRKLGFYEATSRLRSHINPTGTVLLQLENTMQTSLKDLL

SEQ ID NO: 1459 - DNA, 1194 bp, Artificial Sequence
  variant of human alpha-galactosidase A
ctggataatggattggctagaacacctggcatggggtggcttcactgggagaggttcatgtgcaacctggactgtcaggaagaaccagacagctgcatctccgagaagctctttgaggaaatggccgaacgaatggtgactgagggctggaaagatgcaggttacgagtatctgtgtattgacgattgctggatggccccacaacgggattctgagggaagacttcaggctgatccgcagcgcttccctcatggcataaggcagctggcaaaccacgtccacagtaaggggctcaaattgggaatctacgcggacgtgggcaataagacctgtgccggttttccgggatcattcgggtattatgacattgacgcccaaacgtttgctgattggggcgttgacctgctgaaattcgatggttgctactgtgacagcctcgaaaacctggcagacggctacaagcatatgtctctcgccctgaatagaaccggtcggccaatcgtatattcctgcgagtggcctctttacatgtggccatttcagaaaccgaactacacagaaattcgccagtattgcaatcattggaggaacttcgctgatatcgatgactcatgggcctccataaagagcatcttggactggaccagtcggaatcaggagcgaattgtggatgtcgcaggccctggaggatggaacgatccagacatgctggtgatcggcaattttggcctctcttgggaccagcaggttacccaaatggctctgtgggcaattatggccggtcctcttttcatgagcaacgatctgcgcgcgatctcaccacaggcaaaggccctgctccaagacaaagatgtgatagccatcaatcaggacccgttgggaaagcagggctaccagctgagaaaaggcgacaactttgaggtctgggaaaggcctttgagtggagatgcgtgggctgtggccattattaatcggcaagagatcggaggtccacgctcctatacaattcctgtagcatctcttggcaagggcgttgcctgtaacccagcttgcttcatcactcagcttctgccggtgaagagaaaactgggtttctacgaagccaccagcaggctccgatcccacatcaaccctacaggaaccgtcctcttgcagctggagaatacgatgcagacttcactgaaggacctcctg

SEQ ID NO: 1460 - protein, 398 aa, Artificial Sequence
  variant of human alpha-galactosidase A
LDNGLARTPGMGWLHWERFMCNLDCQEEPDSCISEKLFEEMAERMVTEGWKDAGYEYLCIDDCWMAPQRDSEGRLQADPQRFPHGIRQLANHVHSKGLKLGIYADVGNKTCAGFPGSFGYYDIDAQTFADWGVDLLKFDGCYCDSLENLADGYKHMSLALNRTGRPIVYSCEWPLYMWPFQKPNYTEIRQYCNHWRNFADIDDSWASIKSILDWTSRNQERIVDVAGPGGWNDPDMLVIGNFGLSWDQQVTQMALWAIMAGPLFMSNDLRAISPQAKALLQDKDVIAINQDPLGKQGYQLRKGDNFEVWERPLSGDAWAVAIINRQEIGGPRSYTIPVASLGKGVACNPACFITQLLPVKRKLGFYEATSRLRSHINPTGTVLLQLENTMQTSLKDLL

SEQ ID NO: 1461 - DNA, 1194 bp, Artificial Sequence
  variant of human alpha-galactosidase A
ctggataatggattggctagaacacctcatatggggtggcttcactgggagaggttcatgtgcaacctggactgtcaggaagaaccagacagctgcatctccgagaagctctttgaggaaatggccgaacgaatggtgactgagggctggaaagatgcaggttacgagtatctgtgtattgacgattgctggatggccccacaacgggattctgagggaagacttcaggctgatccgcagcgcttccctcatggcataaggcagctggcaaaccacgtccacagtaaggggctcaaattgggaatctacgcggacgtgggcaataagacctgtgccggttttccgggatcattcgggtattatgacattgacgcccaaacgtttgctgattggggcgttgacctgctgaaattcgatggttgctactgtgacagcctcgaaaacctggcagacggctacaagcatatgtctctcgccctgaatagaaccggtcggccaatcgtatattcctgcgagtggcctctttacatgtggccatttcagaaaccgaactacacagaaattcgccagtattgcaatcattggaggaacttcgctgatatcgatgactcatgggcctccataaagagcatcttggactggaccagtcggaatcaggagcgaattgtggatgtcgcaggccctggaggatggaacgatccagacatgctggtgatcggcaattttggcctctcttgggaccagcaggttacccaaatggctctgtgggcaattatggccggtcctcttttcatgagcaacgatctgcgcgcgatctcaccacaggcaaaggccctgctccaagacaaagatgtgatagccatcaatcaggacccgttgggaaagcagggctaccagctgagaaaaggcgacaactttgaggtctgggaaaggcctttgagtggagatgcgtgggctgtggccattattaatcggcaagagatcggaggtccacgctcctatacaattcctgtagcatctcttggcaagggcgttgcctgtaacccagcttgcttcatcactcagcttctgccggtgaagagaaaactgggtttctacgaagctaccagcaggctccgatcccacatcaaccctacaggaaccgtcctcttgcagctggagaatacgatgcagacttcactgaaggacctcctg

SEQ ID NO: 1462 - protein, 398 aa, Artificial Sequence
  variant of human alpha-galactosidase A
LDNGLARTPHMGWLHWERFMCNLDCQEEPDSCISEKLFEEMAERMVTEGWKDAGYEYLCIDDCWMAPQRDSEGRLQADPQRFPHGIRQLANHVHSKGLKLGIYADVGNKTCAGFPGSFGYYDIDAQTFADWGVDLLKFDGCYCDSLENLADGYKHMSLALNRTGRPIVYSCEWPLYMWPFQKPNYTEIRQYCNHWRNFADIDDSWASIKSILDWTSRNQERIVDVAGPGGWNDPDMLVIGNFGLSWDQQVTQMALWAIMAGPLFMSNDLRAISPQAKALLQDKDVIAINQDPLGKQGYQLRKGDNFEVWERPLSGDAWAVAIINRQEIGGPRSYTIPVASLGKGVACNPACFITQLLPVKRKLGFYEATSRLRSHINPTGTVLLQLENTMQTSLKDLL

SEQ ID NO: 1463 - DNA, 1194 bp, Artificial Sequence
  variant of human alpha-galactosidase A
ctggataatggattggctagaacacctattatggggtggcttcactgggagaggttcatgtgcaacctggactgtcaggaagaaccagacagctgcatctccgagaagctctttgaggaaatggccgaacgaatggtgactgagggctggaaagatgcaggttacgagtatctgtgtattgacgattgctggatggccccacaacgggattctgagggaagacttcaggctgatccgcagcgcttccctcatggcataaggcagctggcaaaccacgtccacagtaaggggctcaaattgggaatctacgcggacgtgggcaataagacctgtgccggttttccgggatcattcgggtattatgacattgacgcccaaacgtttgctgattggggcgttgacctgctgaaattcgatggttgctactgtgacagcctcgaaaacctggcagacggctacaagcatatgtctctcgccctgaatagaaccggtcggccaatcgtatattcctgcgagtggcctctttacatgtggccatttcagaaaccgaactacacagaaattcgccagtattgcaatcattggaggaacttcgctgatatcgatgactcatgggcctccataaagagcatcttggactggaccagtcggaatcaggagcgaattgtggatgtcgcaggccctggaggatggaacgatccagacatgctggtgatcggcaattttggcctctcttgggaccagcaggttacccaaatggctctgtgggcaattatggccggtcctcttttcatgagcaacgatctgcgcgcgatctcaccacaggcaaaggccctgctccaagacaaagatgtgatagccatcaatcaggacccgttgggaaagcagggctaccagctgagaaaaggcgacaactttgaggtctgggaaaggcctttgagtggagatgcgtgggctgtggccattattaatcggcaagagatcggaggtccacgctcctatacaattcctgtagcatctcttggcaagggcgttgcctgtaacccagcttgcttcatcactcagcttctgccggtgaagagaaaactgggtttctacgaagctaccagcaggctccgatcccacatcaaccctacaggaaccgtcctcttgcagctggagaatacgatgcagacttcactgaaggacctcctg

SEQ ID NO: 1464 - protein, 398 aa, Artificial Sequence
  variant of human alpha-galactosidase A
LDNGLARTPIMGWLHWERFMCNLDCQEEPDSCISEKLFEEMAERMVTEGWKDAGYEYLCIDDCWMAPQRDSEGRLQADPQRFPHGIRQLANHVHSKGLKLGIYADVGNKTCAGFPGSFGYYDIDAQTFADWGVDLLKFDGCYCDSLENLADGYKHMSLALNRTGRPIVYSCEWPLYMWPFQKPNYTEIRQYCNHWRNFADIDDSWASIKSILDWTSRNQERIVDVAGPGGWNDPDMLVIGNFGLSWDQQVTQMALWAIMAGPLFMSNDLRAISPQAKALLQDKDVIAINQDPLGKQGYQLRKGDNFEVWERPLSGDAWAVAIINRQEIGGPRSYTIPVASLGKGVACNPACFITQLLPVKRKLGFYEATSRLRSHINPTGTVLLQLENTMQTSLKDLL

SEQ ID NO: 1465 - DNA, 1194 bp, Artificial Sequence
  variant of human alpha-galactosidase A
ctggataatggattggctagaacacctaagatggggtggcttcactgggagaggttcatgtgcaacctggactgtcaggaagaaccagacagctgcatctccgagaagctctttgaggaaatggccgaacgaatggtgactgagggctggaaagatgcaggttacgagtatctgtgtattgacgattgctggatggccccacaacgggattctgagggaagacttcaggctgatccgcagcgcttccctcatggcataaggcagctggcaaaccacgtccacagtaaggggctcaaattgggaatctacgcggacgtgggcaataagacctgtgccggttttccgggatcattcgggtattatgacattgacgcccaaacgtttgctgattggggcgttgacctgctgaaattcgatggttgctactgtgacagcctcgaaaacctggcagacggctacaagcatatgtctctcgccctgaatagaaccggtcggccaatcgtatattcctgcgagtggcctctttacatgtggccatttcagaaaccgaactacacagaaattcgccagtattgcaatcattggaggaacttcgctgatatcgatgactcatgggcctccataaagagcatcttggactggaccagtcggaatcaggagcgaattgtggatgtcgcaggccctggaggatggaacgatccagacatgctggtgatcggcaattttggcctctcttgggaccagcaggttacccaaatggctctgtgggcaattatggccggtcctcttttcatgagcaacgatctgcgcgcgatctcaccacaggcaaaggccctgctccaagacaaagatgtgatagccatcaatcaggacccgttgggaaagcagggctaccagctgagaaaaggcgacaactttgaggtctgggaaaggcctttgagtggagatgcgtgggctgtggccattattaatcggcaagagatcggaggtccacgctcctatacaattcctgtagcatctcttggcaagggcgttgcctgtaacccagcttgcttcatcactcagcttctgccggtgaagagaaaactgggtttctacgaagctaccagcaggctccgatcccacatcaaccctacaggaaccgtcctcttgcagctggagaatacgatgcagacttcactgaaggacctcctg

SEQ ID NO: 1466 - protein, 398 aa, Artificial Sequence
  variant of human alpha-galactosidase A
LDNGLARTPKMGWLHWERFMCNLDCQEEPDSCISEKLFEEMAERMVTEGWKDAGYEYLCIDDCWMAPQRDSEGRLQADPQRFPHGIRQLANHVHSKGLKLGIYADVGNKTCAGFPGSFGYYDIDAQTFADWGVDLLKFDGCYCDSLENLADGYKHMSLALNRTGRPIVYSCEWPLYMWPFQKPNYTEIRQYCNHWRNFADIDDSWASIKSILDWTSRNQERIVDVAGPGGWNDPDMLVIGNFGLSWDQQVTQMALWAIMAGPLFMSNDLRAISPQAKALLQDKDVIAINQDPLGKQGYQLRKGDNFEVWERPLSGDAWAVAIINRQEIGGPRSYTIPVASLGKGVACNPACFITQLLPVKRKLGFYEATSRLRSHINPTGTVLLQLENTMQTSLKDLL

SEQ ID NO: 1467 - DNA, 1194 bp, Artificial Sequence
  variant of human alpha-galactosidase A
ctggataatggattggctagaacacctttgatggggtggcttcactgggagaggttcatgtgcaacctggactgtcaggaagaaccagacagctgcatctccgagaagctctttgaggaaatggccgaacgaatggtgactgagggctggaaagatgcaggttacgagtatctgtgtattgacgattgctggatggccccacaacgggattctgagggaagacttcaggctgatccgcagcgcttccctcatggcataaggcagctggcaaaccacgtccacagtaaggggctcaaattgggaatctacgcggacgtgggcaataagacctgtgccggttttccgggatcattcgggtattatgacattgacgcccaaacgtttgctgattggggcgttgacctgctgaaattcgatggttgctactgtgacagcctcgaaaacctggcagacggctacaagcatatgtctctcgccctgaatagaaccggtcggccaatcgtatattcctgcgagtggcctctttacatgtggccatttcagaaaccgaactacacagaaattcgccagtattgcaatcattggaggaacttcgctgatatcgatgactcatgggcctccataaagagcatcttggactggaccagtcggaatcaggagcgaattgtggatgtcgcaggccctggaggatggaacgatccagacatgctggtgatcggcaattttggcctctcttgggaccagcaggttacccaaatggctctgtgggcaattatggccggtcctcttttcatgagcaacgatctgcgcgcgatctcaccacaggcaaaggccctgctccaagacaaagatgtgatagccatcaatcaggacccgttgggaaagcagggctaccagctgagaaaaggcgacaactttgaggtctgggaaaggcctttgagtggagatgcgtgggctgtggccattattaatcggcaagagatcggaggtccacgctcctatacaattcctgtagcatctcttggcaagggcgttgcctgtaacccagcttgcttcatcactcagcttctgccggtgaagagaaaactgggtttctacgaagctaccagcaggctccgatcccacatcaaccctacaggaaccgtcctcttgcagctggagaatacgatgcagacttcactgaaggacctcctg

SEQ ID NO: 1468 - protein, 398 aa, Artificial Sequence
  variant of human alpha-galactosidase A
LDNGLARTPLMGWLHWERFMCNLDCQEEPDSCISEKLFEEMAERMVTEGWKDAGYEYLCIDDCWMAPQRDSEGRLQADPQRFPHGIRQLANHVHSKGLKLGIYADVGNKTCAGFPGSFGYYDIDAQTFADWGVDLLKFDGCYCDSLENLADGYKHMSLALNRTGRPIVYSCEWPLYMWPFQKPNYTEIRQYCNHWRNFADIDDSWASIKSILDWTSRNQERIVDVAGPGGWNDPDMLVIGNFGLSWDQQVTQMALWAIMAGPLFMSNDLRAISPQAKALLQDKDVIAINQDPLGKQGYQLRKGDNFEVWERPLSGDAWAVAIINRQEIGGPRSYTIPVASLGKGVACNPACFITQLLPVKRKLGFYEATSRLRSHINPTGTVLLQLENTMQTSLKDLL

SEQ ID NO: 1469 - DNA, 1194 bp, Artificial Sequence
  variant of human alpha-galactosidase A
ctggataatggattggctagaacacctatgatggggtggcttcactgggagaggttcatgtgcaacctggactgtcaggaagaaccagacagctgcatctccgagaagctctttgaggaaatggccgaacgaatggtgactgagggctggaaagatgcaggttacgagtatctgtgtattgacgattgctggatggccccacaacgggattctgagggaagacttcaggctgatccgcagcgcttccctcatggcataaggcagctggcaaaccacgtccacagtaaggggctcaaattgggaatctacgcggacgtgggcaataagacctgtgccggttttccgggatcattcgggtattatgacattgacgcccaaacgtttgctgattggggcgttgacctgctgaaattcgatggttgctactgtgacagcctcgaaaacctggcagacggctacaagcatatgtctctcgccctgaatagaaccggtcggccaatcgtatattcctgcgagtggcctctttacatgtggccatttcagaaaccgaactacacagaaattcgccagtattgcaatcattggaggaacttcgctgatatcgatgactcatgggcctccataaagagcatcttggactggaccagtcggaatcaggagcgaattgtggatgtcgcaggccctggaggatggaacgatccagacatgctggtgatcggcaattttggcctctcttgggaccagcaggttacccaaatggctctgtgggcaattatggccggtcctcttttcatgagcaacgatctgcgcgcgatctcaccacaggcaaaggccctgctccaagacaaagatgtgatagccatcaatcaggacccgttgggaaagcagggctaccagctgagaaaaggcgacaactttgaggtctgggaaaggcctttgagtggagatgcgtgggctgtggccattattaatcggcaagagatcggaggtccacgctcctatacaattcctgtagcatctcttggcaagggcgttgcctgtaacccagcttgcttcatcactcagcttctgccggtgaagagaaaactgggtttctacgaagctaccagcaggctccgatcccacatcaaccctacaggaaccgtcctcttgcagctggagaatacgatgcagacttcactgaaggacctcctg

SEQ ID NO: 1470 - protein, 398 aa, Artificial Sequence
  variant of human alpha-galactosidase A
LDNGLARTPMMGWLHWERFMCNLDCQEEPDSCISEKLFEEMAERMVTEGWKDAGYEYLCIDDCWMAPQRDSEGRLQADPQRFPHGIRQLANHVHSKGLKLGIYADVGNKTCAGFPGSFGYYDIDAQTFADWGVDLLKFDGCYCDSLENLADGYKHMSLALNRTGRPIVYSCEWPLYMWPFQKPNYTEIRQYCNHWRNFADIDDSWASIKSILDWTSRNQERIVDVAGPGGWNDPDMLVIGNFGLSWDQQVTQMALWAIMAGPLFMSNDLRAISPQAKALLQDKDVIAINQDPLGKQGYQLRKGDNFEVWERPLSGDAWAVAIINRQEIGGPRSYTIPVASLGKGVACNPACFITQLLPVKRKLGFYEATSRLRSHINPTGTVLLQLENTMQTSLKDLL

SEQ ID NO: 1471 - DNA, 1194 bp, Artificial Sequence
  variant of human alpha-galactosidase A
ctggataatggattggctagaacacctaatatggggtggcttcactgggagaggttcatgtgcaacctggactgtcaggaagaaccagacagctgcatctccgagaagctctttgaggaaatggccgaacgaatggtgactgagggctggaaagatgcaggttacgagtatctgtgtattgacgattgctggatggccccacaacgggattctgagggaagacttcaggctgatccgcagcgcttccctcatggcataaggcagctggcaaaccacgtccacagtaaggggctcaaattgggaatctacgcggacgtgggcaataagacctgtgccggttttccgggatcattcgggtattatgacattgacgcccaaacgtttgctgattggggcgttgacctgctgaaattcgatggttgctactgtgacagcctcgaaaacctggcagacggctacaagcatatgtctctcgccctgaatagaaccggtcggccaatcgtatattcctgcgagtggcctctttacatgtggccatttcagaaaccgaactacacagaaattcgccagtattgcaatcattggaggaacttcgctgatatcgatgactcatgggcctccataaagagcatcttggactggaccagtcggaatcaggagcgaattgtggatgtcgcaggccctggaggatggaacgatccagacatgctggtgatcggcaattttggcctctcttgggaccagcaggttacccaaatggctctgtgggcaattatggccggtcctcttttcatgagcaacgatctgcgcgcgatctcaccacaggcaaaggccctgctccaagacaaagatgtgatagccatcaatcaggacccgttgggaaagcagggctaccagctgagaaaaggcgacaactttgaggtctgggaaaggcctttgagtggagatgcgtgggctgtggccattattaatcggcaagagatcggaggtccacgctcctatacaattcctgtagcatctcttggcaagggcgttgcctgtaacccagcttgcttcatcactcagcttctgccggtgaagagaaaactgggtttctacgaagctaccagcaggctccgatcccacatcaaccctacaggaaccgtcctcttgcagctggagaatacgatgcagacttcactgaaggacctcctg

SEQ ID NO: 1472 - protein, 398 aa, Artificial Sequence
  variant of human alpha-galactosidase A
LDNGLARTPNMGWLHWERFMCNLDCQEEPDSCISEKLFEEMAERMVTEGWKDAGYEYLCIDDCWMAPQRDSEGRLQADPQRFPHGIRQLANHVHSKGLKLGIYADVGNKTCAGFPGSFGYYDIDAQTFADWGVDLLKFDGCYCDSLENLADGYKHMSLALNRTGRPIVYSCEWPLYMWPFQKPNYTEIRQYCNHWRNFADIDDSWASIKSILDWTSRNQERIVDVAGPGGWNDPDMLVIGNFGLSWDQQVTQMALWAIMAGPLFMSNDLRAISPQAKALLQDKDVIAINQDPLGKQGYQLRKGDNFEVWERPLSGDAWAVAIINRQEIGGPRSYTIPVASLGKGVACNPACFITQLLPVKRKLGFYEATSRLRSHINPTGTVLLQLENTMQTSLKDLL

SEQ ID NO: 1473 - DNA, 1194 bp, Artificial Sequence
  variant of human alpha-galactosidase A
ctggataatggattggctagaacacctcagatggggtggcttcactgggagaggttcatgtgcaacctggactgtcaggaagaaccagacagctgcatctccgagaagctctttgaggaaatggccgaacgaatggtgactgagggctggaaagatgcaggttacgagtatctgtgtattgacgattgctggatggccccacaacgggattctgagggaagacttcaggctgatccgcagcgcttccctcatggcataaggcagctggcaaaccacgtccacagtaaggggctcaaattgggaatctacgcggacgtgggcaataagacctgtgccggttttccgggatcattcgggtattatgacattgacgcccaaacgtttgctgattggggcgttgacctgctgaaattcgatggttgctactgtgacagcctcgaaaacctggcagacggctacaagcatatgtctctcgccctgaatagaaccggtcggccaatcgtatattcctgcgagtggcctctttacatgtggccatttcagaaaccgaactacacagaaattcgccagtattgcaatcattggaggaacttcgctgatatcgatgactcatgggcctccataaagagcatcttggactggaccagtcggaatcaggagcgaattgtggatgtcgcaggccctggaggatggaacgatccagacatgctggtgatcggcaattttggcctctcttgggaccagcaggttacccaaatggctctgtgggcaattatggccggtcctcttttcatgagcaacgatctgcgcgcgatctcaccacaggcaaaggccctgctccaagacaaagatgtgatagccatcaatcaggacccgttgggaaagcagggctaccagctgagaaaaggcgacaactttgaggtctgggaaaggcctttgagtggagatgcgtgggctgtggccattattaatcggcaagagatcggaggtccacgctcctatacaattcctgtagcatctcttggcaagggcgttgcctgtaacccagcttgcttcatcactcagcttctgccggtgaagagaaaactgggtttctacgaagctaccagcaggctccgatcccacatcaaccctacaggaaccgtcctcttgcagctggagaatacgatgcagacttcactgaaggacctcctg

SEQ ID NO: 1474 - protein, 398 aa, Artificial Sequence
  variant of human alpha-galactosidase A
LDNGLARTPQMGWLHWERFMCNLDCQEEPDSCISEKLFEEMAERMVTEGWKDAGYEYLCIDDCWMAPQRDSEGRLQADPQRFPHGIRQLANHVHSKGLKLGIYADVGNKTCAGFPGSFGYYDIDAQTFADWGVDLLKFDGCYCDSLENLADGYKHMSLALNRTGRPIVYSCEWPLYMWPFQKPNYTEIRQYCNHWRNFADIDDSWASIKSILDWTSRNQERIVDVAGPGGWNDPDMLVIGNFGLSWDQQVTQMALWAIMAGPLFMSNDLRAISPQAKALLQDKDVIAINQDPLGKQGYQLRKGDNFEVWERPLSGDAWAVAIINRQEIGGPRSYTIPVASLGKGVACNPACFITQLLPVKRKLGFYEATSRLRSHINPTGTVLLQLENTMQTSLKDLL

SEQ ID NO: 1475 - DNA, 1194 bp, Artificial Sequence
  variant of human alpha-galactosidase A
ctggataatggattggctagaacacctcgtatggggtggcttcactgggagaggttcatgtgcaacctggactgtcaggaagaaccagacagctgcatctccgagaagctctttgaggaaatggccgaacgaatggtgactgagggctggaaagatgcaggttacgagtatctgtgtattgacgattgctggatggccccacaacgggattctgagggaagacttcaggctgatccgcagcgcttccctcatggcataaggcagctggcaaaccacgtccacagtaaggggctcaaattgggaatctacgcggacgtgggcaataagacctgtgccggttttccgggatcattcgggtattatgacattgacgcccaaacgtttgctgattggggcgttgacctgctgaaattcgatggttgctactgtgacagcctcgaaaacctggcagacggctacaagcatatgtctctcgccctgaatagaaccggtcggccaatcgtatattcctgcgagtggcctctttacatgtggccatttcagaaaccgaactacacagaaattcgccagtattgcaatcattggaggaacttcgctgatatcgatgactcatgggcctccataaagagcatcttggactggaccagtcggaatcaggagcgaattgtggatgtcgcaggccctggaggatggaacgatccagacatgctggtgatcggcaattttggcctctcttgggaccagcaggttacccaaatggctctgtgggcaattatggccggtcctcttttcatgagcaacgatctgcgcgcgatctcaccacaggcaaaggccctgctccaagacaaagatgtgatagccatcaatcaggacccgttgggaaagcagggctaccagctgagaaaaggcgacaactttgaggtctgggaaaggcctttgagtggagatgcgtgggctgtggccattattaatcggcaagagatcggaggtccacgctcctatacaattcctgtagcatctcttggcaagggcgttgcctgtaacccagcttgcttcatcactcagcttctgccggtgaagagaaaactgggtttctacgaagctaccagcaggctccgatcccacatcaaccctacaggaaccgtcctcttgcagctggagaatacgatgcagacttcactgaaggacctcctg

SEQ ID NO: 1476 - protein, 398 aa, Artificial Sequence
  variant of human alpha-galactosidase A
LDNGLARTPRMGWLHWERFMCNLDCQEEPDSCISEKLFEEMAERMVTEGWKDAGYEYLCIDDCWMAPQRDSEGRLQADPQRFPHGIRQLANHVHSKGLKLGIYADVGNKTCAGFPGSFGYYDIDAQTFADWGVDLLKFDGCYCDSLENLADGYKHMSLALNRTGRPIVYSCEWPLYMWPFQKPNYTEIRQYCNHWRNFADIDDSWASIKSILDWTSRNQERIVDVAGPGGWNDPDMLVIGNFGLSWDQQVTQMALWAIMAGPLFMSNDLRAISPQAKALLQDKDVIAINQDPLGKQGYQLRKGDNFEVWERPLSGDAWAVAIINRQEIGGPRSYTIPVASLGKGVACNPACFITQLLPVKRKLGFYEATSRLRSHINPTGTVLLQLENTMQTSLKDLL

SEQ ID NO: 1477 - DNA, 1194 bp, Artificial Sequence
  variant of human alpha-galactosidase A
ctggataatggattggctagaacaccttctatggggtggcttcactgggagaggttcatgtgcaacctggactgtcaggaagaaccagacagctgcatctccgagaagctctttgaggaaatggccgaacgaatggtgactgagggctggaaagatgcaggttacgagtatctgtgtattgacgattgctggatggccccacaacgggattctgagggaagacttcaggctgatccgcagcgcttccctcatggcataaggcagctggcaaaccacgtccacagtaaggggctcaaattgggaatctacgcggacgtgggcaataagacctgtgccggttttccgggatcattcgggtattatgacattgacgcccaaacgtttgctgattggggcgttgacctgctgaaattcgatggttgctactgtgacagcctcgaaaacctggcagacggctacaagcatatgtctctcgccctgaatagaaccggtcggccaatcgtatattcctgcgagtggcctctttacatgtggccatttcagaaaccgaactacacagaaattcgccagtattgcaatcattggaggaacttcgctgatatcgatgactcatgggcctccataaagagcatcttggactggaccagtcggaatcaggagcgaattgtggatgtcgcaggccctggaggatggaacgatccagacatgctggtgatcggcaattttggcctctcttgggaccagcaggttacccaaatggctctgtgggcaattatggccggtcctcttttcatgagcaacgatctgcgcgcgatctcaccacaggcaaaggccctgctccaagacaaagatgtgatagccatcaatcaggacccgttgggaaagcagggctaccagctgagaaaaggcgacaactttgaggtctgggaaaggcctttgagtggagatgcgtgggctgtggccattattaatcggcaagagatcggaggtccacgctcctatacaattcctgtagcatctcttggcaagggcgttgcctgtaacccagcttgcttcatcactcagcttctgccggtgaagagaaaactgggtttctacgaagctaccagcaggctccgatcccacatcaaccctacaggaaccgtcctcttgcagctggagaatacgatgcagacttcactgaaggacctcctg

SEQ ID NO: 1478 - protein, 398 aa, Artificial Sequence
  variant of human alpha-galactosidase A
LDNGLARTPSMGWLHWERFMCNLDCQEEPDSCISEKLFEEMAERMVTEGWKDAGYEYLCIDDCWMAPQRDSEGRLQADPQRFPHGIRQLANHVHSKGLKLGIYADVGNKTCAGFPGSFGYYDIDAQTFADWGVDLLKFDGCYCDSLENLADGYKHMSLALNRTGRPIVYSCEWPLYMWPFQKPNYTEIRQYCNHWRNFADIDDSWASIKSILDWTSRNQERIVDVAGPGGWNDPDMLVIGNFGLSWDQQVTQMALWAIMAGPLFMSNDLRAISPQAKALLQDKDVIAINQDPLGKQGYQLRKGDNFEVWERPLSGDAWAVAIINRQEIGGPRSYTIPVASLGKGVACNPACFITQLLPVKRKLGFYEATSRLRSHINPTGTVLLQLENTMQTSLKDLL

SEQ ID NO: 1479 - DNA, 1194 bp, Artificial Sequence
  variant of human alpha-galactosidase A
ctggataatggattggctagaacacctactatggggtggcttcactgggagaggttcatgtgcaacctggactgtcaggaagaaccagacagctgcatctccgagaagctctttgaggaaatggccgaacgaatggtgactgagggctggaaagatgcaggttacgagtatctgtgtattgacgattgctggatggccccacaacgggattctgagggaagacttcaggctgatccgcagcgcttccctcatggcataaggcagctggcaaaccacgtccacagtaaggggctcaaattgggaatctacgcggacgtgggcaataagacctgtgccggttttccgggatcattcgggtattatgacattgacgcccaaacgtttgctgattggggcgttgacctgctgaaattcgatggttgctactgtgacagcctcgaaaacctggcagacggctacaagcatatgtctctcgccctgaatagaaccggtcggccaatcgtatattcctgcgagtggcctctttacatgtggccatttcagaaaccgaactacacagaaattcgccagtattgcaatcattggaggaacttcgctgatatcgatgactcatgggcctccataaagagcatcttggactggaccagtcggaatcaggagcgaattgtggatgtcgcaggccctggaggatggaacgatccagacatgctggtgatcggcaattttggcctctcttgggaccagcaggttacccaaatggctctgtgggcaattatggccggtcctcttttcatgagcaacgatctgcgcgcgatctcaccacaggcaaaggccctgctccaagacaaagatgtgatagccatcaatcaggacccgttgggaaagcagggctaccagctgagaaaaggcgacaactttgaggtctgggaaaggcctttgagtggagatgcgtgggctgtggccattattaatcggcaagagatcggaggtccacgctcctatacaattcctgtagcatctcttggcaagggcgttgcctgtaacccagcttgcttcatcactcagcttctgccggtgaagagaaaactgggtttctacgaagctaccagcaggctccgatcccacatcaaccctacaggaaccgtcctcttgcagctggagaatacgatgcagacttcactgaaggacctcctg

SEQ ID NO: 1480 - protein, 398 aa, Artificial Sequence
  variant of human alpha-galactosidase A
LDNGLARTPTMGWLHWERFMCNLDCQEEPDSCISEKLFEEMAERMVTEGWKDAGYEYLCIDDCWMAPQRDSEGRLQADPQRFPHGIRQLANHVHSKGLKLGIYADVGNKTCAGFPGSFGYYDIDAQTFADWGVDLLKFDGCYCDSLENLADGYKHMSLALNRTGRPIVYSCEWPLYMWPFQKPNYTEIRQYCNHWRNFADIDDSWASIKSILDWTSRNQERIVDVAGPGGWNDPDMLVIGNFGLSWDQQVTQMALWAIMAGPLFMSNDLRAISPQAKALLQDKDVIAINQDPLGKQGYQLRKGDNFEVWERPLSGDAWAVAIINRQEIGGPRSYTIPVASLGKGVACNPACFITQLLPVKRKLGFYEATSRLRSHINPTGTVLLQLENTMQTSLKDLL

SEQ ID NO: 1481 - DNA, 1194 bp, Artificial Sequence
  variant of human alpha-galactosidase A
ctggataatggattggctagaacacctgtcatggggtggcttcactgggagaggttcatgtgcaacctggactgtcaggaagaaccagacagctgcatctccgagaagctctttgaggaaatggccgaacgaatggtgactgagggctggaaagatgcaggttacgagtatctgtgtattgacgattgctggatggccccacaacgggattctgagggaagacttcaggctgatccgcagcgcttccctcatggcataaggcagctggcaaaccacgtccacagtaaggggctcaaattgggaatctacgcggacgtgggcaataagacctgtgccggttttccgggatcattcgggtattatgacattgacgcccaaacgtttgctgattggggcgttgacctgctgaaattcgatggttgctactgtgacagcctcgaaaacctggcagacggctacaagcatatgtctctcgccctgaatagaaccggtcggccaatcgtatattcctgcgagtggcctctttacatgtggccatttcagaaaccgaactacacagaaattcgccagtattgcaatcattggaggaacttcgctgatatcgatgactcatgggcctccataaagagcatcttggactggaccagtcggaatcaggagcgaattgtggatgtcgcaggccctggaggatggaacgatccagacatgctggtgatcggcaattttggcctctcttgggaccagcaggttacccaaatggctctgtgggcaattatggccggtcctcttttcatgagcaacgatctgcgcgcgatctcaccacaggcaaaggccctgctccaagacaaagatgtgatagccatcaatcaggacccgttgggaaagcagggctaccagctgagaaaaggcgacaactttgaggtctgggaaaggcctttgagtggagatgcgtgggctgtggccattattaatcggcaagagatcggaggtccacgctcctatacaattcctgtagcatctcttggcaagggcgttgcctgtaacccagcttgcttcatcactcagcttctgccggtgaagagaaaactgggtttctacgaagctaccagcaggctccgatcccacatcaaccctacaggaaccgtcctcttgcagctggagaatacgatgcagacttcactgaaggacctcctg

SEQ ID NO: 1482 - protein, 398 aa, Artificial Sequence
  variant of human alpha-galactosidase A
LDNGLARTPVMGWLHWERFMCNLDCQEEPDSCISEKLFEEMAERMVTEGWKDAGYEYLCIDDCWMAPQRDSEGRLQADPQRFPHGIRQLANHVHSKGLKLGIYADVGNKTCAGFPGSFGYYDIDAQTFADWGVDLLKFDGCYCDSLENLADGYKHMSLALNRTGRPIVYSCEWPLYMWPFQKPNYTEIRQYCNHWRNFADIDDSWASIKSILDWTSRNQERIVDVAGPGGWNDPDMLVIGNFGLSWDQQVTQMALWAIMAGPLFMSNDLRAISPQAKALLQDKDVIAINQDPLGKQGYQLRKGDNFEVWERPLSGDAWAVAIINRQEIGGPRSYTIPVASLGKGVACNPACFITQLLPVKRKLGFYEATSRLRSHINPTGTVLLQLENTMQTSLKDLL

SEQ ID NO: 1483 - DNA, 1194 bp, Artificial Sequence
  variant of human alpha-galactosidase A
ctggataatggattggctagaacaccttggatggggtggcttcactgggagaggttcatgtgcaacctggactgtcaggaagaaccagacagctgcatctccgagaagctctttgaggaaatggccgaacgaatggtgactgagggctggaaagatgcaggttacgagtatctgtgtattgacgattgctggatggccccacaacgggattctgagggaagacttcaggctgatccgcagcgcttccctcatggcataaggcagctggcaaaccacgtccacagtaaggggctcaaattgggaatctacgcggacgtgggcaataagacctgtgccggttttccgggatcattcgggtattatgacattgacgcccaaacgtttgctgattggggcgttgacctgctgaaattcgatggttgctactgtgacagcctcgaaaacctggcagacggctacaagcatatgtctctcgccctgaatagaaccggtcggccaatcgtatattcctgcgagtggcctctttacatgtggccatttcagaaaccgaactacacagaaattcgccagtattgcaatcattggaggaacttcgctgatatcgatgactcatgggcctccataaagagcatcttggactggaccagtcggaatcaggagcgaattgtggatgtcgcaggccctggaggatggaacgatccagacatgctggtgatcggcaattttggcctctcttgggaccagcaggttacccaaatggctctgtgggcaattatggccggtcctcttttcatgagcaacgatctgcgcgcgatctcaccacaggcaaaggccctgctccaagacaaagatgtgatagccatcaatcaggacccgttgggaaagcagggctaccagctgagaaaaggcgacaactttgaggtctgggaaaggcctttgagtggagatgcgtgggctgtggccattattaatcggcaagagatcggaggtccacgctcctatacaattcctgtagcatctcttggcaagggcgttgcctgtaacccagcttgcttcatcactcagcttctgccggtgaagagaaaactgggtttctacgaagctaccagcaggctccgatcccacatcaaccctacaggaaccgtcctcttgcagctggagaatacgatgcagacttcactgaaggacctcctg

SEQ ID NO: 1484 - protein, 398 aa, Artificial Sequence
  variant of human alpha-galactosidase A
LDNGLARTPWMGWLHWERFMCNLDCQEEPDSCISEKLFEEMAERMVTEGWKDAGYEYLCIDDCWMAPQRDSEGRLQADPQRFPHGIRQLANHVHSKGLKLGIYADVGNKTCAGFPGSFGYYDIDAQTFADWGVDLLKFDGCYCDSLENLADGYKHMSLALNRTGRPIVYSCEWPLYMWPFQKPNYTEIRQYCNHWRNFADIDDSWASIKSILDWTSRNQERIVDVAGPGGWNDPDMLVIGNFGLSWDQQVTQMALWAIMAGPLFMSNDLRAISPQAKALLQDKDVIAINQDPLGKQGYQLRKGDNFEVWERPLSGDAWAVAIINRQEIGGPRSYTIPVASLGKGVACNPACFITQLLPVKRKLGFYEATSRLRSHINPTGTVLLQLENTMQTSLKDLL

SEQ ID NO: 1485 - DNA, 1194 bp, Artificial Sequence
  variant of human alpha-galactosidase A
ctggataatggattggctagaacaccttatatggggtggcttcactgggagaggttcatgtgcaacctggactgtcaggaagaaccagacagctgcatctccgagaagctctttgaggaaatggccgaacgaatggtgactgagggctggaaagatgcaggttacgagtatctgtgtattgacgattgctggatggccccacaacgggattctgagggaagacttcaggctgatccgcagcgcttccctcatggcataaggcagctggcaaaccacgtccacagtaaggggctcaaattgggaatctacgcggacgtgggcaataagacctgtgccggttttccgggatcattcgggtattatgacattgacgcccaaacgtttgctgattggggcgttgacctgctgaaattcgatggttgctactgtgacagcctcgaaaacctggcagacggctacaagcatatgtctctcgccctgaatagaaccggtcggccaatcgtatattcctgcgagtggcctctttacatgtggccatttcagaaaccgaactacacagaaattcgccagtattgcaatcattggaggaacttcgctgatatcgatgactcatgggcctccataaagagcatcttggactggaccagtcggaatcaggagcgaattgtggatgtcgcaggccctggaggatggaacgatccagacatgctggtgatcggcaattttggcctctcttgggaccagcaggttacccaaatggctctgtgggcaattatggccggtcctcttttcatgagcaacgatctgcgcgcgatctcaccacaggcaaaggccctgctccaagacaaagatgtgatagccatcaatcaggacccgttgggaaagcagggctaccagctgagaaaaggcgacaactttgaggtctgggaaaggcctttgagtggagatgcgtgggctgtggccattattaatcggcaagagatcggaggtccacgctcctatacaattcctgtagcatctcttggcaagggcgttgcctgtaacccagcttgcttcatcactcagcttctgccggtgaagagaaaactgggtttctacgaagctaccagcaggctccgatcccacatcaaccctacaggaaccgtcctcttgcagctggagaatacgatgcagacttcactgaaggacctcctg

SEQ ID NO: 1486 - protein, 398 aa, Artificial Sequence
  variant of human alpha-galactosidase A
LDNGLARTPYMGWLHWERFMCNLDCQEEPDSCISEKLFEEMAERMVTEGWKDAGYEYLCIDDCWMAPQRDSEGRLQADPQRFPHGIRQLANHVHSKGLKLGIYADVGNKTCAGFPGSFGYYDIDAQTFADWGVDLLKFDGCYCDSLENLADGYKHMSLALNRTGRPIVYSCEWPLYMWPFQKPNYTEIRQYCNHWRNFADIDDSWASIKSILDWTSRNQERIVDVAGPGGWNDPDMLVIGNFGLSWDQQVTQMALWAIMAGPLFMSNDLRAISPQAKALLQDKDVIAINQDPLGKQGYQLRKGDNFEVWERPLSGDAWAVAIINRQEIGGPRSYTIPVASLGKGVACNPACFITQLLPVKRKLGFYEATSRLRSHINPTGTVLLQLENTMQTSLKDLL

SEQ ID NO: 1487 - DNA, 1194 bp, Artificial Sequence
  variant of human alpha-galactosidase A
ctggataatggattggctagaacacctcctatggggtggcttcactgggagaggttcatgtgcaacctggactgtcaggaagaaccagacagctgcatctccgagaagctctttgaggaaatggccgaacgaatggtgactgagggctggaaagatgcaggttacgagtatctgtgtattgacgattgctggatggccccacaacgggattctgagggaagacttcaggctgatccgcagcgcttccctcatggcataaggcagctggcaaaccacgtccacagtaaggggctcaaattgggaatctacgcggacgtgggcaataagacctgtgccggttttccgggatcattcgggtattatgacattgacgcccaaacgtttgctgattggggcgttgacctgctgaaattcgatggttgctactgtgacagcctcgaaaacctggcagacggctacaagcatatgtctctcgccctgaatagaaccggtcgggcgatcgtatattcctgcgagtggcctctttacatgtggccatttcagaaaccgaactacacagaaattcgccagtattgcaatcattggaggaacttcgctgatatcgatgactcatgggcctccataaagagcatcttggactggaccagtcggaatcaggagcgaattgtggatgtcgcaggccctggaggatggaacgatccagacatgctggtgatcggcaattttggcctctcttgggaccagcaggttacccaaatggctctgtgggcaattatggccggtcctcttttcatgagcaacgatctgcgcgcgatctcaccacaggcaaaggccctgctccaagacaaagatgtgatagccatcaatcaggacccgttgggaaagcagggctaccagctgagaaaaggcgacaactttgaggtctgggaaaggcctttgagtggagatgcgtgggctgtggccattattaatcggcaagagatcggaggtccacgctcctatacaattcctgtagcatctcttggcaagggcgttgcctgtaacccagcttgcttcatcactcagcttctgccggtgaagagaaaactgggtttctacgaagctaccagcaggctccgatcccacatcaaccctacaggaaccgtcctcttgcagctggagaatacgatgcagacttcactgaaggacctcctg

SEQ ID NO: 1488 - protein, 398 aa, Artificial Sequence
  variant of human alpha-galactosidase A
LDNGLARTPPMGWLHWERFMCNLDCQEEPDSCISEKLFEEMAERMVTEGWKDAGYEYLCIDDCWMAPQRDSEGRLQADPQRFPHGIRQLANHVHSKGLKLGIYADVGNKTCAGFPGSFGYYDIDAQTFADWGVDLLKFDGCYCDSLENLADGYKHMSLALNRTGRAIVYSCEWPLYMWPFQKPNYTEIRQYCNHWRNFADIDDSWASIKSILDWTSRNQERIVDVAGPGGWNDPDMLVIGNFGLSWDQQVTQMALWAIMAGPLFMSNDLRAISPQAKALLQDKDVIAINQDPLGKQGYQLRKGDNFEVWERPLSGDAWAVAIINRQEIGGPRSYTIPVASLGKGVACNPACFITQLLPVKRKLGFYEATSRLRSHINPTGTVLLQLENTMQTSLKDLL

SEQ ID NO: 1489 - DNA, 1194 bp, Artificial Sequence
  variant of human alpha-galactosidase A
ctggataatggattggctagaacacctcctatggggtggcttcactgggagaggttcatgtgcaacctggactgtcaggaagaaccagacagctgcatctccgagaagctctttgaggaaatggccgaacgaatggtgactgagggctggaaagatgcaggttacgagtatctgtgtattgacgattgctggatggccccacaacgggattctgagggaagacttcaggctgatccgcagcgcttccctcatggcataaggcagctggcaaaccacgtccacagtaaggggctcaaattgggaatctacgcggacgtgggcaataagacctgtgccggttttccgggatcattcgggtattatgacattgacgcccaaacgtttgctgattggggcgttgacctgctgaaattcgatggttgctactgtgacagcctcgaaaacctggcagacggctacaagcatatgtctctcgccctgaatagaaccggtcggtgcatcgtatattcctgcgagtggcctctttacatgtggccatttcagaaaccgaactacacagaaattcgccagtattgcaatcattggaggaacttcgctgatatcgatgactcatgggcctccataaagagcatcttggactggaccagtcggaatcaggagcgaattgtggatgtcgcaggccctggaggatggaacgatccagacatgctggtgatcggcaattttggcctctcttgggaccagcaggttacccaaatggctctgtgggcaattatggccggtcctcttttcatgagcaacgatctgcgcgcgatctcaccacaggcaaaggccctgctccaagacaaagatgtgatagccatcaatcaggacccgttgggaaagcagggctaccagctgagaaaaggcgacaactttgaggtctgggaaaggcctttgagtggagatgcgtgggctgtggccattattaatcggcaagagatcggaggtccacgctcctatacaattcctgtagcatctcttggcaagggcgttgcctgtaacccagcttgcttcatcactcagcttctgccggtgaagagaaaactgggtttctacgaagctaccagcaggctccgatcccacatcaaccctacaggaaccgtcctcttgcagctggagaatacgatgcagacttcactgaaggacctcctg

SEQ ID NO: 1490 - protein, 398 aa, Artificial Sequence
  variant of human alpha-galactosidase A
LDNGLARTPPMGWLHWERFMCNLDCQEEPDSCISEKLFEEMAERMVTEGWKDAGYEYLCIDDCWMAPQRDSEGRLQADPQRFPHGIRQLANHVHSKGLKLGIYADVGNKTCAGFPGSFGYYDIDAQTFADWGVDLLKFDGCYCDSLENLADGYKHMSLALNRTGRCIVYSCEWPLYMWPFQKPNYTEIRQYCNHWRNFADIDDSWASIKSILDWTSRNQERIVDVAGPGGWNDPDMLVIGNFGLSWDQQVTQMALWAIMAGPLFMSNDLRAISPQAKALLQDKDVIAINQDPLGKQGYQLRKGDNFEVWERPLSGDAWAVAIINRQEIGGPRSYTIPVASLGKGVACNPACFITQLLPVKRKLGFYEATSRLRSHINPTGTVLLQLENTMQTSLKDLL

SEQ ID NO: 1491 - DNA, 1194 bp, Artificial Sequence
  variant of human alpha-galactosidase A
ctggataatggattggctagaacacctcctatggggtggcttcactgggagaggttcatgtgcaacctggactgtcaggaagaaccagacagctgcatctccgagaagctctttgaggaaatggccgaacgaatggtgactgagggctggaaagatgcaggttacgagtatctgtgtattgacgattgctggatggccccacaacgggattctgagggaagacttcaggctgatccgcagcgcttccctcatggcataaggcagctggcaaaccacgtccacagtaaggggctcaaattgggaatctacgcggacgtgggcaataagacctgtgccggttttccgggatcattcgggtattatgacattgacgcccaaacgtttgctgattggggcgttgacctgctgaaattcgatggttgctactgtgacagcctcgaaaacctggcagacggctacaagcatatgtctctcgccctgaatagaaccggtcgggatatcgtatattcctgcgagtggcctctttacatgtggccatttcagaaaccgaactacacagaaattcgccagtattgcaatcattggaggaacttcgctgatatcgatgactcatgggcctccataaagagcatcttggactggaccagtcggaatcaggagcgaattgtggatgtcgcaggccctggaggatggaacgatccagacatgctggtgatcggcaattttggcctctcttgggaccagcaggttacccaaatggctctgtgggcaattatggccggtcctcttttcatgagcaacgatctgcgcgcgatctcaccacaggcaaaggccctgctccaagacaaagatgtgatagccatcaatcaggacccgttgggaaagcagggctaccagctgagaaaaggcgacaactttgaggtctgggaaaggcctttgagtggagatgcgtgggctgtggccattattaatcggcaagagatcggaggtccacgctcctatacaattcctgtagcatctcttggcaagggcgttgcctgtaacccagcttgcttcatcactcagcttctgccggtgaagagaaaactgggtttctacgaagctaccagcaggctccgatcccacatcaaccctacaggaaccgtcctcttgcagctggagaatacgatgcagacttcactgaaggacctcctg

SEQ ID NO: 1492 - protein, 398 aa, Artificial Sequence
  variant of human alpha-galactosidase A
LDNGLARTPPMGWLHWERFMCNLDCQEEPDSCISEKLFEEMAERMVTEGWKDAGYEYLCIDDCWMAPQRDSEGRLQADPQRFPHGIRQLANHVHSKGLKLGIYADVGNKTCAGFPGSFGYYDIDAQTFADWGVDLLKFDGCYCDSLENLADGYKHMSLALNRTGRDIVYSCEWPLYMWPFQKPNYTEIRQYCNHWRNFADIDDSWASIKSILDWTSRNQERIVDVAGPGGWNDPDMLVIGNFGLSWDQQVTQMALWAIMAGPLFMSNDLRAISPQAKALLQDKDVIAINQDPLGKQGYQLRKGDNFEVWERPLSGDAWAVAIINRQEIGGPRSYTIPVASLGKGVACNPACFITQLLPVKRKLGFYEATSRLRSHINPTGTVLLQLENTMQTSLKDLL

SEQ ID NO: 1493 - DNA, 1194 bp, Artificial Sequence
  variant of human alpha-galactosidase A
ctggataatggattggctagaacacctcctatggggtggcttcactgggagaggttcatgtgcaacctggactgtcaggaagaaccagacagctgcatctccgagaagctctttgaggaaatggccgaacgaatggtgactgagggctggaaagatgcaggttacgagtatctgtgtattgacgattgctggatggccccacaacgggattctgagggaagacttcaggctgatccgcagcgcttccctcatggcataaggcagctggcaaaccacgtccacagtaaggggctcaaattgggaatctacgcggacgtgggcaataagacctgtgccggttttccgggatcattcgggtattatgacattgacgcccaaacgtttgctgattggggcgttgacctgctgaaattcgatggttgctactgtgacagcctcgaaaacctggcagacggctacaagcatatgtctctcgccctgaatagaaccggtcgggagatcgtatattcctgcgagtggcctctttacatgtggccatttcagaaaccgaactacacagaaattcgccagtattgcaatcattggaggaacttcgctgatatcgatgactcatgggcctccataaagagcatcttggactggaccagtcggaatcaggagcgaattgtggatgtcgcaggccctggaggatggaacgatccagacatgctggtgatcggcaattttggcctctcttgggaccagcaggttacccaaatggctctgtgggcaattatggccggtcctcttttcatgagcaacgatctgcgcgcgatctcaccacaggcaaaggccctgctccaagacaaagatgtgatagccatcaatcaggacccgttgggaaagcagggctaccagctgagaaaaggcgacaactttgaggtctgggaaaggcctttgagtggagatgcgtgggctgtggccattattaatcggcaagagatcggaggtccacgctcctatacaattcctgtagcatctcttggcaagggcgttgcctgtaacccagcttgcttcatcactcagcttctgccggtgaagagaaaactgggtttctacgaagctaccagcaggctccgatcccacatcaaccctacaggaaccgtcctcttgcagctggagaatacgatgcagacttcactgaaggacctcctg

SEQ ID NO: 1494 - protein, 398 aa, Artificial Sequence
  variant of human alpha-galactosidase A
LDNGLARTPPMGWLHWERFMCNLDCQEEPDSCISEKLFEEMAERMVTEGWKDAGYEYLCIDDCWMAPQRDSEGRLQADPQRFPHGIRQLANHVHSKGLKLGIYADVGNKTCAGFPGSFGYYDIDAQTFADWGVDLLKFDGCYCDSLENLADGYKHMSLALNRTGREIVYSCEWPLYMWPFQKPNYTEIRQYCNHWRNFADIDDSWASIKSILDWTSRNQERIVDVAGPGGWNDPDMLVIGNFGLSWDQQVTQMALWAIMAGPLFMSNDLRAISPQAKALLQDKDVIAINQDPLGKQGYQLRKGDNFEVWERPLSGDAWAVAIINRQEIGGPRSYTIPVASLGKGVACNPACFITQLLPVKRKLGFYEATSRLRSHINPTGTVLLQLENTMQTSLKDLL

SEQ ID NO: 1495 - DNA, 1194 bp, Artificial Sequence
  variant of human alpha-galactosidase A
ctggataatggattggctagaacacctcctatggggtggcttcactgggagaggttcatgtgcaacctggactgtcaggaagaaccagacagctgcatctccgagaagctctttgaggaaatggccgaacgaatggtgactgagggctggaaagatgcaggttacgagtatctgtgtattgacgattgctggatggccccacaacgggattctgagggaagacttcaggctgatccgcagcgcttccctcatggcataaggcagctggcaaaccacgtccacagtaaggggctcaaattgggaatctacgcggacgtgggcaataagacctgtgccggttttccgggatcattcgggtattatgacattgacgcccaaacgtttgctgattggggcgttgacctgctgaaattcgatggttgctactgtgacagcctcgaaaacctggcagacggctacaagcatatgtctctcgccctgaatagaaccggtcggtttatcgtatattcctgcgagtggcctctttacatgtggccatttcagaaaccgaactacacagaaattcgccagtattgcaatcattggaggaacttcgctgatatcgatgactcatgggcctccataaagagcatcttggactggaccagtcggaatcaggagcgaattgtggatgtcgcaggccctggaggatggaacgatccagacatgctggtgatcggcaattttggcctctcttgggaccagcaggttacccaaatggctctgtgggcaattatggccggtcctcttttcatgagcaacgatctgcgcgcgatctcaccacaggcaaaggccctgctccaagacaaagatgtgatagccatcaatcaggacccgttgggaaagcagggctaccagctgagaaaaggcgacaactttgaggtctgggaaaggcctttgagtggagatgcgtgggctgtggccattattaatcggcaagagatcggaggtccacgctcctatacaattcctgtagcatctcttggcaagggcgttgcctgtaacccagcttgcttcatcactcagcttctgccggtgaagagaaaactgggtttctacgaagctaccagcaggctccgatcccacatcaaccctacaggaaccgtcctcttgcagctggagaatacgatgcagacttcactgaaggacctcctg

SEQ ID NO: 1496 - protein, 398 aa, Artificial Sequence
  variant of human alpha-galactosidase A
LDNGLARTPPMGWLHWERFMCNLDCQEEPDSCISEKLFEEMAERMVTEGWKDAGYEYLCIDDCWMAPQRDSEGRLQADPQRFPHGIRQLANHVHSKGLKLGIYADVGNKTCAGFPGSFGYYDIDAQTFADWGVDLLKFDGCYCDSLENLADGYKHMSLALNRTGRFIVYSCEWPLYMWPFQKPNYTEIRQYCNHWRNFADIDDSWASIKSILDWTSRNQERIVDVAGPGGWNDPDMLVIGNFGLSWDQQVTQMALWAIMAGPLFMSNDLRAISPQAKALLQDKDVIAINQDPLGKQGYQLRKGDNFEVWERPLSGDAWAVAIINRQEIGGPRSYTIPVASLGKGVACNPACFITQLLPVKRKLGFYEATSRLRSHINPTGTVLLQLENTMQTSLKDLL

SEQ ID NO: 1497 - DNA, 1194 bp, Artificial Sequence
  variant of human alpha-galactosidase A
ctggataatggattggctagaacacctcctatggggtggcttcactgggagaggttcatgtgcaacctggactgtcaggaagaaccagacagctgcatctccgagaagctctttgaggaaatggccgaacgaatggtgactgagggctggaaagatgcaggttacgagtatctgtgtattgacgattgctggatggccccacaacgggattctgagggaagacttcaggctgatccgcagcgcttccctcatggcataaggcagctggcaaaccacgtccacagtaaggggctcaaattgggaatctacgcggacgtgggcaataagacctgtgccggttttccgggatcattcgggtattatgacattgacgcccaaacgtttgctgattggggcgttgacctgctgaaattcgatggttgctactgtgacagcctcgaaaacctggcagacggctacaagcatatgtctctcgccctgaatagaaccggtcgggggatcgtatattcctgcgagtggcctctttacatgtggccatttcagaaaccgaactacacagaaattcgccagtattgcaatcattggaggaacttcgctgatatcgatgactcatgggcctccataaagagcatcttggactggaccagtcggaatcaggagcgaattgtggatgtcgcaggccctggaggatggaacgatccagacatgctggtgatcggcaattttggcctctcttgggaccagcaggttacccaaatggctctgtgggcaattatggccggtcctcttttcatgagcaacgatctgcgcgcgatctcaccacaggcaaaggccctgctccaagacaaagatgtgatagccatcaatcaggacccgttgggaaagcagggctaccagctgagaaaaggcgacaactttgaggtctgggaaaggcctttgagtggagatgcgtgggctgtggccattattaatcggcaagagatcggaggtccacgctcctatacaattcctgtagcatctcttggcaagggcgttgcctgtaacccagcttgcttcatcactcagcttctgccggtgaagagaaaactgggtttctacgaagctaccagcaggctccgatcccacatcaaccctacaggaaccgtcctcttgcagctggagaatacgatgcagacttcactgaaggacctcctg

SEQ ID NO: 1498 - protein, 398 aa, Artificial Sequence
  variant of human alpha-galactosidase A
LDNGLARTPPMGWLHWERFMCNLDCQEEPDSCISEKLFEEMAERMVTEGWKDAGYEYLCIDDCWMAPQRDSEGRLQADPQRFPHGIRQLANHVHSKGLKLGIYADVGNKTCAGFPGSFGYYDIDAQTFADWGVDLLKFDGCYCDSLENLADGYKHMSLALNRTGRGIVYSCEWPLYMWPFQKPNYTEIRQYCNHWRNFADIDDSWASIKSILDWTSRNQERIVDVAGPGGWNDPDMLVIGNFGLSWDQQVTQMALWAIMAGPLFMSNDLRAISPQAKALLQDKDVIAINQDPLGKQGYQLRKGDNFEVWERPLSGDAWAVAIINRQEIGGPRSYTIPVASLGKGVACNPACFITQLLPVKRKLGFYEATSRLRSHINPTGTVLLQLENTMQTSLKDLL

SEQ ID NO: 1499 - DNA, 1194 bp, Artificial Sequence
  variant of human alpha-galactosidase A
ctggataatggattggctagaacacctcctatggggtggcttcactgggagaggttcatgtgcaacctggactgtcaggaagaaccagacagctgcatctccgagaagctctttgaggaaatggccgaacgaatggtgactgagggctggaaagatgcaggttacgagtatctgtgtattgacgattgctggatggccccacaacgggattctgagggaagacttcaggctgatccgcagcgcttccctcatggcataaggcagctggcaaaccacgtccacagtaaggggctcaaattgggaatctacgcggacgtgggcaataagacctgtgccggttttccgggatcattcgggtattatgacattgacgcccaaacgtttgctgattggggcgttgacctgctgaaattcgatggttgctactgtgacagcctcgaaaacctggcagacggctacaagcatatgtctctcgccctgaatagaaccggtcggcatatcgtatattcctgcgagtggcctctttacatgtggccatttcagaaaccgaactacacagaaattcgccagtattgcaatcattggaggaacttcgctgatatcgatgactcatgggcctccataaagagcatcttggactggaccagtcggaatcaggagcgaattgtggatgtcgcaggccctggaggatggaacgatccagacatgctggtgatcggcaattttggcctctcttgggaccagcaggttacccaaatggctctgtgggcaattatggccggtcctcttttcatgagcaacgatctgcgcgcgatctcaccacaggcaaaggccctgctccaagacaaagatgtgatagccatcaatcaggacccgttgggaaagcagggctaccagctgagaaaaggcgacaactttgaggtctgggaaaggcctttgagtggagatgcgtgggctgtggccattattaatcggcaagagatcggaggtccacgctcctatacaattcctgtagcatctcttggcaagggcgttgcctgtaacccagcttgcttcatcactcagcttctgccggtgaagagaaaactgggtttctacgaagctaccagcaggctccgatcccacatcaaccctacaggaaccgtcctcttgcagctggagaatacgatgcagacttcactgaaggacctcctg

SEQ ID NO: 1500 - protein, 398 aa, Artificial Sequence
  variant of human alpha-galactosidase A
LDNGLARTPPMGWLHWERFMCNLDCQEEPDSCISEKLFEEMAERMVTEGWKDAGYEYLCIDDCWMAPQRDSEGRLQADPQRFPHGIRQLANHVHSKGLKLGIYADVGNKTCAGFPGSFGYYDIDAQTFADWGVDLLKFDGCYCDSLENLADGYKHMSLALNRTGRHIVYSCEWPLYMWPFQKPNYTEIRQYCNHWRNFADIDDSWASIKSILDWTSRNQERIVDVAGPGGWNDPDMLVIGNFGLSWDQQVTQMALWAIMAGPLFMSNDLRAISPQAKALLQDKDVIAINQDPLGKQGYQLRKGDNFEVWERPLSGDAWAVAIINRQEIGGPRSYTIPVASLGKGVACNPACFITQLLPVKRKLGFYEATSRLRSHINPTGTVLLQLENTMQTSLKDLL

SEQ ID NO: 1501 - DNA, 1194 bp, Artificial Sequence
  variant of human alpha-galactosidase A
ctggataatggattggctagaacacctcctatggggtggcttcactgggagaggttcatgtgcaacctggactgtcaggaagaaccagacagctgcatctccgagaagctctttgaggaaatggccgaacgaatggtgactgagggctggaaagatgcaggttacgagtatctgtgtattgacgattgctggatggccccacaacgggattctgagggaagacttcaggctgatccgcagcgcttccctcatggcataaggcagctggcaaaccacgtccacagtaaggggctcaaattgggaatctacgcggacgtgggcaataagacctgtgccggttttccgggatcattcgggtattatgacattgacgcccaaacgtttgctgattggggcgttgacctgctgaaattcgatggttgctactgtgacagcctcgaaaacctggcagacggctacaagcatatgtctctcgccctgaatagaaccggtcggattatcgtatattcctgcgagtggcctctttacatgtggccatttcagaaaccgaactacacagaaattcgccagtattgcaatcattggaggaacttcgctgatatcgatgactcatgggcctccataaagagcatcttggactggaccagtcggaatcaggagcgaattgtggatgtcgcaggccctggaggatggaacgatccagacatgctggtgatcggcaattttggcctctcttgggaccagcaggttacccaaatggctctgtgggcaattatggccggtcctcttttcatgagcaacgatctgcgcgcgatctcaccacaggcaaaggccctgctccaagacaaagatgtgatagccatcaatcaggacccgttgggaaagcagggctaccagctgagaaaaggcgacaactttgaggtctgggaaaggcctttgagtggagatgcgtgggctgtggccattattaatcggcaagagatcggaggtccacgctcctatacaattcctgtagcatctcttggcaagggcgttgcctgtaacccagcttgcttcatcactcagcttctgccggtgaagagaaaactgggtttctacgaagctaccagcaggctccgatcccacatcaaccctacaggaaccgtcctcttgcagctggagaatacgatgcagacttcactgaaggacctcctg

SEQ ID NO: 1502 - protein, 398 aa, Artificial Sequence
  variant of human alpha-galactosidase A
LDNGLARTPPMGWLHWERFMCNLDCQEEPDSCISEKLFEEMAERMVTEGWKDAGYEYLCIDDCWMAPQRDSEGRLQADPQRFPHGIRQLANHVHSKGLKLGIYADVGNKTCAGFPGSFGYYDIDAQTFADWGVDLLKFDGCYCDSLENLADGYKHMSLALNRTGRIIVYSCEWPLYMWPFQKPNYTEIRQYCNHWRNFADIDDSWASIKSILDWTSRNQERIVDVAGPGGWNDPDMLVIGNFGLSWDQQVTQMALWAIMAGPLFMSNDLRAISPQAKALLQDKDVIAINQDPLGKQGYQLRKGDNFEVWERPLSGDAWAVAIINRQEIGGPRSYTIPVASLGKGVACNPACFITQLLPVKRKLGFYEATSRLRSHINPTGTVLLQLENTMQTSLKDLL

SEQ ID NO: 1503 - DNA, 1194 bp, Artificial Sequence
  variant of human alpha-galactosidase A
ctggataatggattggctagaacacctcctatggggtggcttcactgggagaggttcatgtgcaacctggactgtcaggaagaaccagacagctgcatctccgagaagctctttgaggaaatggccgaacgaatggtgactgagggctggaaagatgcaggttacgagtatctgtgtattgacgattgctggatggccccacaacgggattctgagggaagacttcaggctgatccgcagcgcttccctcatggcataaggcagctggcaaaccacgtccacagtaaggggctcaaattgggaatctacgcggacgtgggcaataagacctgtgccggttttccgggatcattcgggtattatgacattgacgcccaaacgtttgctgattggggcgttgacctgctgaaattcgatggttgctactgtgacagcctcgaaaacctggcagacggctacaagcatatgtctctcgccctgaatagaaccggtcggaagatcgtatattcctgcgagtggcctctttacatgtggccatttcagaaaccgaactacacagaaattcgccagtattgcaatcattggaggaacttcgctgatatcgatgactcatgggcctccataaagagcatcttggactggaccagtcggaatcaggagcgaattgtggatgtcgcaggccctggaggatggaacgatccagacatgctggtgatcggcaattttggcctctcttgggaccagcaggttacccaaatggctctgtgggcaattatggccggtcctcttttcatgagcaacgatctgcgcgcgatctcaccacaggcaaaggccctgctccaagacaaagatgtgatagccatcaatcaggacccgttgggaaagcagggctaccagctgagaaaaggcgacaactttgaggtctgggaaaggcctttgagtggagatgcgtgggctgtggccattattaatcggcaagagatcggaggtccacgctcctatacaattcctgtagcatctcttggcaagggcgttgcctgtaacccagcttgcttcatcactcagcttctgccggtgaagagaaaactgggtttctacgaagctaccagcaggctccgatcccacatcaaccctacaggaaccgtcctcttgcagctggagaatacgatgcagacttcactgaaggacctcctg

SEQ ID NO: 1504 - protein, 398 aa, Artificial Sequence; identical to SEQ ID NO: 206
  variant of human alpha-galactosidase A

SEQ ID NO: 1505 - DNA, 1194 bp, Artificial Sequence
  variant of human alpha-galactosidase A
ctggataatggattggctagaacacctcctatggggtggcttcactgggagaggttcatgtgcaacctggactgtcaggaagaaccagacagctgcatctccgagaagctctttgaggaaatggccgaacgaatggtgactgagggctggaaagatgcaggttacgagtatctgtgtattgacgattgctggatggccccacaacgggattctgagggaagacttcaggctgatccgcagcgcttccctcatggcataaggcagctggcaaaccacgtccacagtaaggggctcaaattgggaatctacgcggacgtgggcaataagacctgtgccggttttccgggatcattcgggtattatgacattgacgcccaaacgtttgctgattggggcgttgacctgctgaaattcgatggttgctactgtgacagcctcgaaaacctggcagacggctacaagcatatgtctctcgccctgaatagaaccggtcggctgatcgtatattcctgcgagtggcctctttacatgtggccatttcagaaaccgaactacacagaaattcgccagtattgcaatcattggaggaacttcgctgatatcgatgactcatgggcctccataaagagcatcttggactggaccagtcggaatcaggagcgaattgtggatgtcgcaggccctggaggatggaacgatccagacatgctggtgatcggcaattttggcctctcttgggaccagcaggttacccaaatggctctgtgggcaattatggccggtcctcttttcatgagcaacgatctgcgcgcgatctcaccacaggcaaaggccctgctccaagacaaagatgtgatagccatcaatcaggacccgttgggaaagcagggctaccagctgagaaaaggcgacaactttgaggtctgggaaaggcctttgagtggagatgcgtgggctgtggccattattaatcggcaagagatcggaggtccacgctcctatacaattcctgtagcatctcttggcaagggcgttgcctgtaacccagcttgcttcatcactcagcttctgccggtgaagagaaaactgggtttctacgaagctaccagcaggctccgatcccacatcaaccctacaggaaccgtcctcttgcagctggagaatacgatgcagacttcactgaaggacctcctg

SEQ ID NO: 1506 - protein, 398 aa, Artificial Sequence
  variant of human alpha-galactosidase A
LDNGLARTPPMGWLHWERFMCNLDCQEEPDSCISEKLFEEMAERMVTEGWKDAGYEYLCIDDCWMAPQRDSEGRLQADPQRFPHGIRQLANHVHSKGLKLGIYADVGNKTCAGFPGSFGYYDIDAQTFADWGVDLLKFDGCYCDSLENLADGYKHMSLALNRTGRLIVYSCEWPLYMWPFQKPNYTEIRQYCNHWRNFADIDDSWASIKSILDWTSRNQERIVDVAGPGGWNDPDMLVIGNFGLSWDQQVTQMALWAIMAGPLFMSNDLRAISPQAKALLQDKDVIAINQDPLGKQGYQLRKGDNFEVWERPLSGDAWAVAIINRQEIGGPRSYTIPVASLGKGVACNPACFITQLLPVKRKLGFYEATSRLRSHINPTGTVLLQLENTMQTSLKDLL

SEQ ID NO: 1507 - DNA, 1194 bp, Artificial Sequence
  variant of human alpha-galactosidase A
ctggataatggattggctagaacacctcctatggggtggcttcactgggagaggttcatgtgcaacctggactgtcaggaagaaccagacagctgcatctccgagaagctctttgaggaaatggccgaacgaatggtgactgagggctggaaagatgcaggttacgagtatctgtgtattgacgattgctggatggccccacaacgggattctgagggaagacttcaggctgatccgcagcgcttccctcatggcataaggcagctggcaaaccacgtccacagtaaggggctcaaattgggaatctacgcggacgtgggcaataagacctgtgccggttttccgggatcattcgggtattatgacattgacgcccaaacgtttgctgattggggcgttgacctgctgaaattcgatggttgctactgtgacagcctcgaaaacctggcagacggctacaagcatatgtctctcgccctgaatagaaccggtcggatgatcgtatattcctgcgagtggcctctttacatgtggccatttcagaaaccgaactacacagaaattcgccagtattgcaatcattggaggaacttcgctgatatcgatgactcatgggcctccataaagagcatcttggactggaccagtcggaatcaggagcgaattgtggatgtcgcaggccctggaggatggaacgatccagacatgctggtgatcggcaattttggcctctcttgggaccagcaggttacccaaatggctctgtgggcaattatggccggtcctcttttcatgagcaacgatctgcgcgcgatctcaccacaggcaaaggccctgctccaagacaaagatgtgatagccatcaatcaggacccgttgggaaagcagggctaccagctgagaaaaggcgacaactttgaggtctgggaaaggcctttgagtggagatgcgtgggctgtggccattattaatcggcaagagatcggaggtccacgctcctatacaattcctgtagcatctcttggcaagggcgttgcctgtaacccagcttgcttcatcactcagcttctgccggtgaagagaaaactgggtttctacgaagctaccagcaggctccgatcccacatcaaccctacaggaaccgtcctcttgcagctggagaatacgatgcagacttcactgaaggacctcctg

SEQ ID NO: 1508 - protein, 398 aa, Artificial Sequence
  variant of human alpha-galactosidase A
LDNGLARTPPMGWLHWERFMCNLDCQEEPDSCISEKLFEEMAERMVTEGWKDAGYEYLCIDDCWMAPQRDSEGRLQADPQRFPHGIRQLANHVHSKGLKLGIYADVGNKTCAGFPGSFGYYDIDAQTFADWGVDLLKFDGCYCDSLENLADGYKHMSLALNRTGRMIVYSCEWPLYMWPFQKPNYTEIRQYCNHWRNFADIDDSWASIKSILDWTSRNQERIVDVAGPGGWNDPDMLVIGNFGLSWDQQVTQMALWAIMAGPLFMSNDLRAISPQAKALLQDKDVIAINQDPLGKQGYQLRKGDNFEVWERPLSGDAWAVAIINRQEIGGPRSYTIPVASLGKGVACNPACFITQLLPVKRKLGFYEATSRLRSHINPTGTVLLQLENTMQTSLKDLL

SEQ ID NO: 1509 - DNA, 1194 bp, Artificial Sequence
  variant of human alpha-galactosidase A
ctggataatggattggctagaacacctcctatggggtggcttcactgggagaggttcatgtgcaacctggactgtcaggaagaaccagacagctgcatctccgagaagctctttgaggaaatggccgaacgaatggtgactgagggctggaaagatgcaggttacgagtatctgtgtattgacgattgctggatggccccacaacgggattctgagggaagacttcaggctgatccgcagcgcttccctcatggcataaggcagctggcaaaccacgtccacagtaaggggctcaaattgggaatctacgcggacgtgggcaataagacctgtgccggttttccgggatcattcgggtattatgacattgacgcccaaacgtttgctgattggggcgttgacctgctgaaattcgatggttgctactgtgacagcctcgaaaacctggcagacggctacaagcatatgtctctcgccctgaatagaaccggtcggaacatcgtatattcctgcgagtggcctctttacatgtggccatttcagaaaccgaactacacagaaattcgccagtattgcaatcattggaggaacttcgctgatatcgatgactcatgggcctccataaagagcatcttggactggaccagtcggaatcaggagcgaattgtggatgtcgcaggccctggaggatggaacgatccagacatgctggtgatcggcaattttggcctctcttgggaccagcaggttacccaaatggctctgtgggcaattatggccggtcctcttttcatgagcaacgatctgcgcgcgatctcaccacaggcaaaggccctgctccaagacaaagatgtgatagccatcaatcaggacccgttgggaaagcagggctaccagctgagaaaaggcgacaactttgaggtctgggaaaggcctttgagtggagatgcgtgggctgtggccattattaatcggcaagagatcggaggtccacgctcctatacaattcctgtagcatctcttggcaagggcgttgcctgtaacccagcttgcttcatcactcagcttctgccggtgaagagaaaactgggtttctacgaagctaccagcaggctccgatcccacatcaaccctacaggaaccgtcctcttgcagctggagaatacgatgcagacttcactgaaggacctcctg

SEQ ID NO: 1510 - protein, 398 aa, Artificial Sequence
  variant of human alpha-galactosidase A
LDNGLARTPPMGWLHWERFMCNLDCQEEPDSCISEKLFEEMAERMVTEGWKDAGYEYLCIDDCWMAPQRDSEGRLQADPQRFPHGIRQLANHVHSKGLKLGIYADVGNKTCAGFPGSFGYYDIDAQTFADWGVDLLKFDGCYCDSLENLADGYKHMSLALNRTGRNIVYSCEWPLYMWPFQKPNYTEIRQYCNHWRNFADIDDSWASIKSILDWTSRNQERIVDVAGPGGWNDPDMLVIGNFGLSWDQQVTQMALWAIMAGPLFMSNDLRAISPQAKALLQDKDVIAINQDPLGKQGYQLRKGDNFEVWERPLSGDAWAVAIINRQEIGGPRSYTIPVASLGKGVACNPACFITQLLPVKRKLGFYEATSRLRSHINPTGTVLLQLENTMQTSLKDLL

SEQ ID NO: 1511 - DNA, 1194 bp, Artificial Sequence
  variant of human alpha-galactosidase A
ctggataatggattggctagaacacctcctatggggtggcttcactgggagaggttcatgtgcaacctggactgtcaggaagaaccagacagctgcatctccgagaagctctttgaggaaatggccgaacgaatggtgactgagggctggaaagatgcaggttacgagtatctgtgtattgacgattgctggatggccccacaacgggattctgagggaagacttcaggctgatccgcagcgcttccctcatggcataaggcagctggcaaaccacgtccacagtaaggggctcaaattgggaatctacgcggacgtgggcaataagacctgtgccggttttccgggatcattcgggtattatgacattgacgcccaaacgtttgctgattggggcgttgacctgctgaaattcgatggttgctactgtgacagcctcgaaaacctggcagacggctacaagcatatgtctctcgccctgaatagaaccggtcggcagatcgtatattcctgcgagtggcctctttacatgtggccatttcagaaaccgaactacacagaaattcgccagtattgcaatcattggaggaacttcgctgatatcgatgactcatgggcctccataaagagcatcttggactggaccagtcggaatcaggagcgaattgtggatgtcgcaggccctggaggatggaacgatccagacatgctggtgatcggcaattttggcctctcttgggaccagcaggttacccaaatggctctgtgggcaattatggccggtcctcttttcatgagcaacgatctgcgcgcgatctcaccacaggcaaaggccctgctccaagacaaagatgtgatagccatcaatcaggacccgttgggaaagcagggctaccagctgagaaaaggcgacaactttgaggtctgggaaaggcctttgagtggagatgcgtgggctgtggccattattaatcggcaagagatcggaggtccacgctcctatacaattcctgtagcatctcttggcaagggcgttgcctgtaacccagcttgcttcatcactcagcttctgccggtgaagagaaaactgggtttctacgaagctaccagcaggctccgatcccacatcaaccctacaggaaccgtcctcttgcagctggagaatacgatgcagacttcactgaaggacctcctg

SEQ ID NO: 1512 - protein, 398 aa, Artificial Sequence
  variant of human alpha-galactosidase A
LDNGLARTPPMGWLHWERFMCNLDCQEEPDSCISEKLFEEMAERMVTEGWKDAGYEYLCIDDCWMAPQRDSEGRLQADPQRFPHGIRQLANHVHSKGLKLGIYADVGNKTCAGFPGSFGYYDIDAQTFADWGVDLLKFDGCYCDSLENLADGYKHMSLALNRTGRQIVYSCEWPLYMWPFQKPNYTEIRQYCNHWRNFADIDDSWASIKSILDWTSRNQERIVDVAGPGGWNDPDMLVIGNFGLSWDQQVTQMALWAIMAGPLFMSNDLRAISPQAKALLQDKDVIAINQDPLGKQGYQLRKGDNFEVWERPLSGDAWAVAIINRQEIGGPRSYTIPVASLGKGVACNPACFITQLLPVKRKLGFYEATSRLRSHINPTGTVLLQLENTMQTSLKDLL

SEQ ID NO: 1513 - DNA, 1194 bp, Artificial Sequence
  variant of human alpha-galactosidase A
ctggataatggattggctagaacacctcctatggggtggcttcactgggagaggttcatgtgcaacctggactgtcaggaagaaccagacagctgcatctccgagaagctctttgaggaaatggccgaacgaatggtgactgagggctggaaagatgcaggttacgagtatctgtgtattgacgattgctggatggccccacaacgggattctgagggaagacttcaggctgatccgcagcgcttccctcatggcataaggcagctggcaaaccacgtccacagtaaggggctcaaattgggaatctacgcggacgtgggcaataagacctgtgccggttttccgggatcattcgggtattatgacattgacgcccaaacgtttgctgattggggcgttgacctgctgaaattcgatggttgctactgtgacagcctcgaaaacctggcagacggctacaagcatatgtctctcgccctgaatagaaccggtcggcggatcgtatattcctgcgagtggcctctttacatgtggccatttcagaaaccgaactacacagaaattcgccagtattgcaatcattggaggaacttcgctgatatcgatgactcatgggcctccataaagagcatcttggactggaccagtcggaatcaggagcgaattgtggatgtcgcaggccctggaggatggaacgatccagacatgctggtgatcggcaattttggcctctcttgggaccagcaggttacccaaatggctctgtgggcaattatggccggtcctcttttcatgagcaacgatctgcgcgcgatctcaccacaggcaaaggccctgctccaagacaaagatgtgatagccatcaatcaggacccgttgggaaagcagggctaccagctgagaaaaggcgacaactttgaggtctgggaaaggcctttgagtggagatgcgtgggctgtggccattattaatcggcaagagatcggaggtccacgctcctatacaattcctgtagcatctcttggcaagggcgttgcctgtaacccagcttgcttcatcactcagcttctgccggtgaagagaaaactgggtttctacgaagctaccagcaggctccgatcccacatcaaccctacaggaaccgtcctcttgcagctggagaatacgatgcagacttcactgaaggacctcctg

SEQ ID NO: 1514 - protein, 398 aa, Artificial Sequence
  variant of human alpha-galactosidase A
LDNGLARTPPMGWLHWERFMCNLDCQEEPDSCISEKLFEEMAERMVTEGWKDAGYEYLCIDDCWMAPQRDSEGRLQADPQRFPHGIRQLANHVHSKGLKLGIYADVGNKTCAGFPGSFGYYDIDAQTFADWGVDLLKFDGCYCDSLENLADGYKHMSLALNRTGRRIVYSCEWPLYMWPFQKPNYTEIRQYCNHWRNFADIDDSWASIKSILDWTSRNQERIVDVAGPGGWNDPDMLVIGNFGLSWDQQVTQMALWAIMAGPLFMSNDLRAISPQAKALLQDKDVIAINQDPLGKQGYQLRKGDNFEVWERPLSGDAWAVAIINRQEIGGPRSYTIPVASLGKGVACNPACFITQLLPVKRKLGFYEATSRLRSHINPTGTVLLQLENTMQTSLKDLL

SEQ ID NO: 1515 - DNA, 1194 bp, Artificial Sequence
  variant of human alpha-galactosidase A
ctggataatggattggctagaacacctcctatggggtggcttcactgggagaggttcatgtgcaacctggactgtcaggaagaaccagacagctgcatctccgagaagctctttgaggaaatggccgaacgaatggtgactgagggctggaaagatgcaggttacgagtatctgtgtattgacgattgctggatggccccacaacgggattctgagggaagacttcaggctgatccgcagcgcttccctcatggcataaggcagctggcaaaccacgtccacagtaaggggctcaaattgggaatctacgcggacgtgggcaataagacctgtgccggttttccgggatcattcgggtattatgacattgacgcccaaacgtttgctgattggggcgttgacctgctgaaattcgatggttgctactgtgacagcctcgaaaacctggcagacggctacaagcatatgtctctcgccctgaatagaaccggtcggagtatcgtatattcctgcgagtggcctctttacatgtggccatttcagaaaccgaactacacagaaattcgccagtattgcaatcattggaggaacttcgctgatatcgatgactcatgggcctccataaagagcatcttggactggaccagtcggaatcaggagcgaattgtggatgtcgcaggccctggaggatggaacgatccagacatgctggtgatcggcaattttggcctctcttgggaccagcaggttacccaaatggctctgtgggcaattatggccggtcctcttttcatgagcaacgatctgcgcgcgatctcaccacaggcaaaggccctgctccaagacaaagatgtgatagccatcaatcaggacccgttgggaaagcagggctaccagctgagaaaaggcgacaactttgaggtctgggaaaggcctttgagtggagatgcgtgggctgtggccattattaatcggcaagagatcggaggtccacgctcctatacaattcctgtagcatctcttggcaagggcgttgcctgtaacccagcttgcttcatcactcagcttctgccggtgaagagaaaactgggtttctacgaagctaccagcaggctccgatcccacatcaaccctacaggaaccgtcctcttgcagctggagaatacgatgcagacttcactgaaggacctcctg

SEQ ID NO: 1516 - protein, 398 aa, Artificial Sequence
  variant of human alpha-galactosidase A
LDNGLARTPPMGWLHWERFMCNLDCQEEPDSCISEKLFEEMAERMVTEGWKDAGYEYLCIDDCWMAPQRDSEGRLQADPQRFPHGIRQLANHVHSKGLKLGIYADVGNKTCAGFPGSFGYYDIDAQTFADWGVDLLKFDGCYCDSLENLADGYKHMSLALNRTGRSIVYSCEWPLYMWPFQKPNYTEIRQYCNHWRNFADIDDSWASIKSILDWTSRNQERIVDVAGPGGWNDPDMLVIGNFGLSWDQQVTQMALWAIMAGPLFMSNDLRAISPQAKALLQDKDVIAINQDPLGKQGYQLRKGDNFEVWERPLSGDAWAVAIINRQEIGGPRSYTIPVASLGKGVACNPACFITQLLPVKRKLGFYEATSRLRSHINPTGTVLLQLENTMQTSLKDLL

SEQ ID NO: 1517 - DNA, 1194 bp, Artificial Sequence
  variant of human alpha-galactosidase A
ctggataatggattggctagaacacctcctatggggtggcttcactgggagaggttcatgtgcaacctggactgtcaggaagaaccagacagctgcatctccgagaagctctttgaggaaatggccgaacgaatggtgactgagggctggaaagatgcaggttacgagtatctgtgtattgacgattgctggatggccccacaacgggattctgagggaagacttcaggctgatccgcagcgcttccctcatggcataaggcagctggcaaaccacgtccacagtaaggggctcaaattgggaatctacgcggacgtgggcaataagacctgtgccggttttccgggatcattcgggtattatgacattgacgcccaaacgtttgctgattggggcgttgacctgctgaaattcgatggttgctactgtgacagcctcgaaaacctggcagacggctacaagcatatgtctctcgccctgaatagaaccggtcggaccatcgtatattcctgcgagtggcctctttacatgtggccatttcagaaaccgaactacacagaaattcgccagtattgcaatcattggaggaacttcgctgatatcgatgactcatgggcctccataaagagcatcttggactggaccagtcggaatcaggagcgaattgtggatgtcgcaggccctggaggatggaacgatccagacatgctggtgatcggcaattttggcctctcttgggaccagcaggttacccaaatggctctgtgggcaattatggccggtcctcttttcatgagcaacgatctgcgcgcgatctcaccacaggcaaaggccctgctccaagacaaagatgtgatagccatcaatcaggacccgttgggaaagcagggctaccagctgagaaaaggcgacaactttgaggtctgggaaaggcctttgagtggagatgcgtgggctgtggccattattaatcggcaagagatcggaggtccacgctcctatacaattcctgtagcatctcttggcaagggcgttgcctgtaacccagcttgcttcatcactcagcttctgccggtgaagagaaaactgggtttctacgaagctaccagcaggctccgatcccacatcaaccctacaggaaccgtcctcttgcagctggagaatacgatgcagacttcactgaaggacctcctg

SEQ ID NO: 1518 - protein, 398 aa, Artificial Sequence
  variant of human alpha-galactosidase A
LDNGLARTPPMGWLHWERFMCNLDCQEEPDSCISEKLFEEMAERMVTEGWKDAGYEYLCIDDCWMAPQRDSEGRLQADPQRFPHGIRQLANHVHSKGLKLGIYADVGNKTCAGFPGSFGYYDIDAQTFADWGVDLLKFDGCYCDSLENLADGYKHMSLALNRTGRTIVYSCEWPLYMWPFQKPNYTEIRQYCNHWRNFADIDDSWASIKSILDWTSRNQERIVDVAGPGGWNDPDMLVIGNFGLSWDQQVTQMALWAIMAGPLFMSNDLRAISPQAKALLQDKDVIAINQDPLGKQGYQLRKGDNFEVWERPLSGDAWAVAIINRQEIGGPRSYTIPVASLGKGVACNPACFITQLLPVKRKLGFYEATSRLRSHINPTGTVLLQLENTMQTSLKDLL

SEQ ID NO: 1519 - DNA, 1194 bp, Artificial Sequence
  variant of human alpha-galactosidase A
ctggataatggattggctagaacacctcctatggggtggcttcactgggagaggttcatgtgcaacctggactgtcaggaagaaccagacagctgcatctccgagaagctctttgaggaaatggccgaacgaatggtgactgagggctggaaagatgcaggttacgagtatctgtgtattgacgattgctggatggccccacaacgggattctgagggaagacttcaggctgatccgcagcgcttccctcatggcataaggcagctggcaaaccacgtccacagtaaggggctcaaattgggaatctacgcggacgtgggcaataagacctgtgccggttttccgggatcattcgggtattatgacattgacgcccaaacgtttgctgattggggcgttgacctgctgaaattcgatggttgctactgtgacagcctcgaaaacctggcagacggctacaagcatatgtctctcgccctgaatagaaccggtcgggtgatcgtatattcctgcgagtggcctctttacatgtggccatttcagaaaccgaactacacagaaattcgccagtattgcaatcattggaggaacttcgctgatatcgatgactcatgggcctccataaagagcatcttggactggaccagtcggaatcaggagcgaattgtggatgtcgcaggccctggaggatggaacgatccagacatgctggtgatcggcaattttggcctctcttgggaccagcaggttacccaaatggctctgtgggcaattatggccggtcctcttttcatgagcaacgatctgcgcgcgatctcaccacaggcaaaggccctgctccaagacaaagatgtgatagccatcaatcaggacccgttgggaaagcagggctaccagctgagaaaaggcgacaactttgaggtctgggaaaggcctttgagtggagatgcgtgggctgtggccattattaatcggcaagagatcggaggtccacgctcctatacaattcctgtagcatctcttggcaagggcgttgcctgtaacccagcttgcttcatcactcagcttctgccggtgaagagaaaactgggtttctacgaagctaccagcaggctccgatcccacatcaaccctacaggaaccgtcctcttgcagctggagaatacgatgcagacttcactgaaggacctcctg

SEQ ID NO: 1520 - protein, 398 aa, Artificial Sequence
  variant of human alpha-galactosidase A
LDNGLARTPPMGWLHWERFMCNLDCQEEPDSCISEKLFEEMAERMVTEGWKDAGYEYLCIDDCWMAPQRDSEGRLQADPQRFPHGIRQLANHVHSKGLKLGIYADVGNKTCAGFPGSFGYYDIDAQTFADWGVDLLKFDGCYCDSLENLADGYKHMSLALNRTGRVIVYSCEWPLYMWPFQKPNYTEIRQYCNHWRNFADIDDSWASIKSILDWTSRNQERIVDVAGPGGWNDPDMLVIGNFGLSWDQQVTQMALWAIMAGPLFMSNDLRAISPQAKALLQDKDVIAINQDPLGKQGYQLRKGDNFEVWERPLSGDAWAVAIINRQEIGGPRSYTIPVASLGKGVACNPACFITQLLPVKRKLGFYEATSRLRSHINPTGTVLLQLENTMQTSLKDLL

SEQ ID NO: 1521 - DNA, 1194 bp, Artificial Sequence
  variant of human alpha-galactosidase A
ctggataatggattggctagaacacctcctatggggtggcttcactgggagaggttcatgtgcaacctggactgtcaggaagaaccagacagctgcatctccgagaagctctttgaggaaatggccgaacgaatggtgactgagggctggaaagatgcaggttacgagtatctgtgtattgacgattgctggatggccccacaacgggattctgagggaagacttcaggctgatccgcagcgcttccctcatggcataaggcagctggcaaaccacgtccacagtaaggggctcaaattgggaatctacgcggacgtgggcaataagacctgtgccggttttccgggatcattcgggtattatgacattgacgcccaaacgtttgctgattggggcgttgacctgctgaaattcgatggttgctactgtgacagcctcgaaaacctggcagacggctacaagcatatgtctctcgccctgaatagaaccggtcggtggatcgtatattcctgcgagtggcctctttacatgtggccatttcagaaaccgaactacacagaaattcgccagtattgcaatcattggaggaacttcgctgatatcgatgactcatgggcctccataaagagcatcttggactggaccagtcggaatcaggagcgaattgtggatgtcgcaggccctggaggatggaacgatccagacatgctggtgatcggcaattttggcctctcttgggaccagcaggttacccaaatggctctgtgggcaattatggccggtcctcttttcatgagcaacgatctgcgcgcgatctcaccacaggcaaaggccctgctccaagacaaagatgtgatagccatcaatcaggacccgttgggaaagcagggctaccagctgagaaaaggcgacaactttgaggtctgggaaaggcctttgagtggagatgcgtgggctgtggccattattaatcggcaagagatcggaggtccacgctcctatacaattcctgtagcatctcttggcaagggcgttgcctgtaacccagcttgcttcatcactcagcttctgccggtgaagagaaaactgggtttctacgaagctaccagcaggctccgatcccacatcaaccctacaggaaccgtcctcttgcagctggagaatacgatgcagacttcactgaaggacctcctg

SEQ ID NO: 1522 - protein, 398 aa, Artificial Sequence
  variant of human alpha-galactosidase A
LDNGLARTPPMGWLHWERFMCNLDCQEEPDSCISEKLFEEMAERMVTEGWKDAGYEYLCIDDCWMAPQRDSEGRLQADPQRFPHGIRQLANHVHSKGLKLGIYADVGNKTCAGFPGSFGYYDIDAQTFADWGVDLLKFDGCYCDSLENLADGYKHMSLALNRTGRWIVYSCEWPLYMWPFQKPNYTEIRQYCNHWRNFADIDDSWASIKSILDWTSRNQERIVDVAGPGGWNDPDMLVIGNFGLSWDQQVTQMALWAIMAGPLFMSNDLRAISPQAKALLQDKDVIAINQDPLGKQGYQLRKGDNFEVWERPLSGDAWAVAIINRQEIGGPRSYTIPVASLGKGVACNPACFITQLLPVKRKLGFYEATSRLRSHINPTGTVLLQLENTMQTSLKDLL

SEQ ID NO: 1523 - DNA, 1194 bp, Artificial Sequence
  variant of human alpha-galactosidase A
ctggataatggattggctagaacacctcctatggggtggcttcactgggagaggttcatgtgcaacctggactgtcaggaagaaccagacagctgcatctccgagaagctctttgaggaaatggccgaacgaatggtgactgagggctggaaagatgcaggttacgagtatctgtgtattgacgattgctggatggccccacaacgggattctgagggaagacttcaggctgatccgcagcgcttccctcatggcataaggcagctggcaaaccacgtccacagtaaggggctcaaattgggaatctacgcggacgtgggcaataagacctgtgccggttttccgggatcattcgggtattatgacattgacgcccaaacgtttgctgattggggcgttgacctgctgaaattcgatggttgctactgtgacagcctcgaaaacctggcagacggctacaagcatatgtctctcgccctgaatagaaccggtcggtatatcgtatattcctgcgagtggcctctttacatgtggccatttcagaaaccgaactacacagaaattcgccagtattgcaatcattggaggaacttcgctgatatcgatgactcatgggcctccataaagagcatcttggactggaccagtcggaatcaggagcgaattgtggatgtcgcaggccctggaggatggaacgatccagacatgctggtgatcggcaattttggcctctcttgggaccagcaggttacccaaatggctctgtgggcaattatggccggtcctcttttcatgagcaacgatctgcgcgcgatctcaccacaggcaaaggccctgctccaagacaaagatgtgatagccatcaatcaggacccgttgggaaagcagggctaccagctgagaaaaggcgacaactttgaggtctgggaaaggcctttgagtggagatgcgtgggctgtggccattattaatcggcaagagatcggaggtccacgctcctatacaattcctgtagcatctcttggcaagggcgttgcctgtaacccagcttgcttcatcactcagcttctgccggtgaagagaaaactgggtttctacgaagctaccagcaggctccgatcccacatcaaccctacaggaaccgtcctcttgcagctggagaatacgatgcagacttcactgaaggacctcctg

SEQ ID NO: 1524 - protein, 398 aa, Artificial Sequence
  variant of human alpha-galactosidase A
LDNGLARTPPMGWLHWERFMCNLDCQEEPDSCISEKLFEEMAERMVTEGWKDAGYEYLCIDDCWMAPQRDSEGRLQADPQRFPHGIRQLANHVHSKGLKLGIYADVGNKTCAGFPGSFGYYDIDAQTFADWGVDLLKFDGCYCDSLENLADGYKHMSLALNRTGRYIVYSCEWPLYMWPFQKPNYTEIRQYCNHWRNFADIDDSWASIKSILDWTSRNQERIVDVAGPGGWNDPDMLVIGNFGLSWDQQVTQMALWAIMAGPLFMSNDLRAISPQAKALLQDKDVIAINQDPLGKQGYQLRKGDNFEVWERPLSGDAWAVAIINRQEIGGPRSYTIPVASLGKGVACNPACFITQLLPVKRKLGFYEATSRLRSHINPTGTVLLQLENTMQTSLKDLL

SEQ ID NO: 1525 - DNA, 1194 bp, Artificial Sequence
  variant of human alpha-galactosidase A
ctggataatggattggctagaacacctcctatggggtggcttcactgggagaggttcatgtgcaacctggactgtcaggaagaaccagacagctgcatctccgagaagctctttgaggaaatggccgaacgaatggtgactgagggctggaaagatgcaggttacgagtatctgtgtattgacgattgctggatggccccacaacgggattctgagggaagacttcaggctgatccgcagcgcttccctcatggcataaggcagctggcaaaccacgtccacagtaaggggctcaaattgggaatctacgcggacgtgggcaataagacctgtgccggttttccgggatcattcgggtattatgacattgacgcccaaacgtttgctgattggggcgttgacctgctgaaattcgatggttgctactgtgacagcctcgaaaacctggcagacggctacaagcatatgtctctcgccctgaatagaaccggtcggccaatcgtatattcctgcgagtggcctctttacatgtggccatttcagaaaccgaactacacagaaattcgccagtattgcaatcattggaggaacttcgctgatatcgatgactcatgggcctccataaagagcatcttggactggaccagtcggaatcaggagcgaattgtggatgtcgcaggccctggaggatggaacgatccagacatgctggtgatcggcaattttggcctctcttgggaccagcaggttacccaaatggctctgtgggcaattatggccggtcctcttttcatgagcaacgatctgcgcgcgatctcaccacaggcaaaggccctgctccaagacaaagatgtgatagccatcaatcaggacccgttgggaaagcagggctaccagctgagaaaaggcgacaactttgaggtctgggaaaggcctttgagtggagatgcgtgggctgtggccattattaatcggcaagagatcggaggtccacgctcctatacaattgctgtagcatctcttggcaagggcgttgcctgtaacccagcttgcttcatcactcagcttctgccggtgaagagaaaactgggtttctacgaagctaccagcaggctccgatcccacatcaaccctacaggaaccgtcctcttgcagctggagaatacgatgcagacttcactgaaggacctcctg

SEQ ID NO: 1526 - protein, 398 aa, Artificial Sequence
  variant of human alpha-galactosidase A
LDNGLARTPPMGWLHWERFMCNLDCQEEPDSCISEKLFEEMAERMVTEGWKDAGYEYLCIDDCWMAPQRDSEGRLQADPQRFPHGIRQLANHVHSKGLKLGIYADVGNKTCAGFPGSFGYYDIDAQTFADWGVDLLKFDGCYCDSLENLADGYKHMSLALNRTGRPIVYSCEWPLYMWPFQKPNYTEIRQYCNHWRNFADIDDSWASIKSILDWTSRNQERIVDVAGPGGWNDPDMLVIGNFGLSWDQQVTQMALWAIMAGPLFMSNDLRAISPQAKALLQDKDVIAINQDPLGKQGYQLRKGDNFEVWERPLSGDAWAVAIINRQEIGGPRSYTIAVASLGKGVACNPACFITQLLPVKRKLGFYEATSRLRSHINPTGTVLLQLENTMQTSLKDLL

SEQ ID NO: 1527 - DNA, 1194 bp, Artificial Sequence
  variant of human alpha-galactosidase A
ctggataatggattggctagaacacctcctatggggtggcttcactgggagaggttcatgtgcaacctggactgtcaggaagaaccagacagctgcatctccgagaagctctttgaggaaatggccgaacgaatggtgactgagggctggaaagatgcaggttacgagtatctgtgtattgacgattgctggatggccccacaacgggattctgagggaagacttcaggctgatccgcagcgcttccctcatggcataaggcagctggcaaaccacgtccacagtaaggggctcaaattgggaatctacgcggacgtgggcaataagacctgtgccggttttccgggatcattcgggtattatgacattgacgcccaaacgtttgctgattggggcgttgacctgctgaaattcgatggttgctactgtgacagcctcgaaaacctggcagacggctacaagcatatgtctctcgccctgaatagaaccggtcggccaatcgtatattcctgcgagtggcctctttacatgtggccatttcagaaaccgaactacacagaaattcgccagtattgcaatcattggaggaacttcgctgatatcgatgactcatgggcctccataaagagcatcttggactggaccagtcggaatcaggagcgaattgtggatgtcgcaggccctggaggatggaacgatccagacatgctggtgatcggcaattttggcctctcttgggaccagcaggttacccaaatggctctgtgggcaattatggccggtcctcttttcatgagcaacgatctgcgcgcgatctcaccacaggcaaaggccctgctccaagacaaagatgtgatagccatcaatcaggacccgttgggaaagcagggctaccagctgagaaaaggcgacaactttgaggtctgggaaaggcctttgagtggagatgcgtgggctgtggccattattaatcggcaagagatcggaggtccacgctcctatacaatttgtgtagcatctcttggcaagggcgttgcctgtaacccagcttgcttcatcactcagcttctgccggtgaagagaaaactgggtttctacgaagctaccagcaggctccgatcccacatcaaccctacaggaaccgtcctcttgcagctggagaatacgatgcagacttcactgaaggacctcctg

SEQ ID NO: 1528 - protein, 398 aa, Artificial Sequence
  variant of human alpha-galactosidase A
LDNGLARTPPMGWLHWERFMCNLDCQEEPDSCISEKLFEEMAERMVTEGWKDAGYEYLCIDDCWMAPQRDSEGRLQADPQRFPHGIRQLANHVHSKGLKLGIYADVGNKTCAGFPGSFGYYDIDAQTFADWGVDLLKFDGCYCDSLENLADGYKHMSLALNRTGRPIVYSCEWPLYMWPFQKPNYTEIRQYCNHWRNFADIDDSWASIKSILDWTSRNQERIVDVAGPGGWNDPDMLVIGNFGLSWDQQVTQMALWAIMAGPLFMSNDLRAISPQAKALLQDKDVIAINQDPLGKQGYQLRKGDNFEVWERPLSGDAWAVAIINRQEIGGPRSYTICVASLGKGVACNPACFITQLLPVKRKLGFYEATSRLRSHINPTGTVLLQLENTMQTSLKDLL

SEQ ID NO: 1529 - DNA, 1194 bp, Artificial Sequence
  variant of human alpha-galactosidase A
ctggataatggattggctagaacacctcctatggggtggcttcactgggagaggttcatgtgcaacctggactgtcaggaagaaccagacagctgcatctccgagaagctctttgaggaaatggccgaacgaatggtgactgagggctggaaagatgcaggttacgagtatctgtgtattgacgattgctggatggccccacaacgggattctgagggaagacttcaggctgatccgcagcgcttccctcatggcataaggcagctggcaaaccacgtccacagtaaggggctcaaattgggaatctacgcggacgtgggcaataagacctgtgccggttttccgggatcattcgggtattatgacattgacgcccaaacgtttgctgattggggcgttgacctgctgaaattcgatggttgctactgtgacagcctcgaaaacctggcagacggctacaagcatatgtctctcgccctgaatagaaccggtcggccaatcgtatattcctgcgagtggcctctttacatgtggccatttcagaaaccgaactacacagaaattcgccagtattgcaatcattggaggaacttcgctgatatcgatgactcatgggcctccataaagagcatcttggactggaccagtcggaatcaggagcgaattgtggatgtcgcaggccctggaggatggaacgatccagacatgctggtgatcggcaattttggcctctcttgggaccagcaggttacccaaatggctctgtgggcaattatggccggtcctcttttcatgagcaacgatctgcgcgcgatctcaccacaggcaaaggccctgctccaagacaaagatgtgatagccatcaatcaggacccgttgggaaagcagggctaccagctgagaaaaggcgacaactttgaggtctgggaaaggcctttgagtggagatgcgtgggctgtggccattattaatcggcaagagatcggaggtccacgctcctatacaattgatgtagcatctcttggcaagggcgttgcctgtaacccagcttgcttcatcactcagcttctgccggtgaagagaaaactgggtttctacgaagctaccagcaggctccgatcccacatcaaccctacaggaaccgtcctcttgcagctggagaatacgatgcagacttcactgaaggacctcctg

SEQ ID NO: 1530 - protein, 398 aa, Artificial Sequence
  variant of human alpha-galactosidase A
LDNGLARTPPMGWLHWERFMCNLDCQEEPDSCISEKLFEEMAERMVTEGWKDAGYEYLCIDDCWMAPQRDSEGRLQADPQRFPHGIRQLANHVHSKGLKLGIYADVGNKTCAGFPGSFGYYDIDAQTFADWGVDLLKFDGCYCDSLENLADGYKHMSLALNRTGRPIVYSCEWPLYMWPFQKPNYTEIRQYCNHWRNFADIDDSWASIKSILDWTSRNQERIVDVAGPGGWNDPDMLVIGNFGLSWDQQVTQMALWAIMAGPLFMSNDLRAISPQAKALLQDKDVIAINQDPLGKQGYQLRKGDNFEVWERPLSGDAWAVAIINRQEIGGPRSYTIDVASLGKGVACNPACFITQLLPVKRKLGFYEATSRLRSHINPTGTVLLQLENTMQTSLKDLL

SEQ ID NO: 1531 - DNA, 1194 bp, Artificial Sequence
  variant of human alpha-galactosidase A
ctggataatggattggctagaacacctcctatggggtggcttcactgggagaggttcatgtgcaacctggactgtcaggaagaaccagacagctgcatctccgagaagctctttgaggaaatggccgaacgaatggtgactgagggctggaaagatgcaggttacgagtatctgtgtattgacgattgctggatggccccacaacgggattctgagggaagacttcaggctgatccgcagcgcttccctcatggcataaggcagctggcaaaccacgtccacagtaaggggctcaaattgggaatctacgcggacgtgggcaataagacctgtgccggttttccgggatcattcgggtattatgacattgacgcccaaacgtttgctgattggggcgttgacctgctgaaattcgatggttgctactgtgacagcctcgaaaacctggcagacggctacaagcatatgtctctcgccctgaatagaaccggtcggccaatcgtatattcctgcgagtggcctctttacatgtggccatttcagaaaccgaactacacagaaattcgccagtattgcaatcattggaggaacttcgctgatatcgatgactcatgggcctccataaagagcatcttggactggaccagtcggaatcaggagcgaattgtggatgtcgcaggccctggaggatggaacgatccagacatgctggtgatcggcaattttggcctctcttgggaccagcaggttacccaaatggctctgtgggcaattatggccggtcctcttttcatgagcaacgatctgcgcgcgatctcaccacaggcaaaggccctgctccaagacaaagatgtgatagccatcaatcaggacccgttgggaaagcagggctaccagctgagaaaaggcgacaactttgaggtctgggaaaggcctttgagtggagatgcgtgggctgtggccattattaatcggcaagagatcggaggtccacgctcctatacaattgaggtagcatctcttggcaagggcgttgcctgtaacccagcttgcttcatcactcagcttctgccggtgaagagaaaactgggtttctacgaagctaccagcaggctccgatcccacatcaaccctacaggaaccgtcctcttgcagctggagaatacgatgcagacttcactgaaggacctcctg

SEQ ID NO: 1532 - protein, 398 aa, Artificial Sequence
  variant of human alpha-galactosidase A
LDNGLARTPPMGWLHWERFMCNLDCQEEPDSCISEKLFEEMAERMVTEGWKDAGYEYLCIDDCWMAPQRDSEGRLQADPQRFPHGIRQLANHVHSKGLKLGIYADVGNKTCAGFPGSFGYYDIDAQTFADWGVDLLKFDGCYCDSLENLADGYKHMSLALNRTGRPIVYSCEWPLYMWPFQKPNYTEIRQYCNHWRNFADIDDSWASIKSILDWTSRNQERIVDVAGPGGWNDPDMLVIGNFGLSWDQQVTQMALWAIMAGPLFMSNDLRAISPQAKALLQDKDVIAINQDPLGKQGYQLRKGDNFEVWERPLSGDAWAVAIINRQEIGGPRSYTIEVASLGKGVACNPACFITQLLPVKRKLGFYEATSRLRSHINPTGTVLLQLENTMQTSLKDLL

SEQ ID NO: 1533 - DNA, 1194 bp, Artificial Sequence
  variant of human alpha-galactosidase A
ctggataatggattggctagaacacctcctatggggtggcttcactgggagaggttcatgtgcaacctggactgtcaggaagaaccagacagctgcatctccgagaagctctttgaggaaatggccgaacgaatggtgactgagggctggaaagatgcaggttacgagtatctgtgtattgacgattgctggatggccccacaacgggattctgagggaagacttcaggctgatccgcagcgcttccctcatggcataaggcagctggcaaaccacgtccacagtaaggggctcaaattgggaatctacgcggacgtgggcaataagacctgtgccggttttccgggatcattcgggtattatgacattgacgcccaaacgtttgctgattggggcgttgacctgctgaaattcgatggttgctactgtgacagcctcgaaaacctggcagacggctacaagcatatgtctctcgccctgaatagaaccggtcggccaatcgtatattcctgcgagtggcctctttacatgtggccatttcagaaaccgaactacacagaaattcgccagtattgcaatcattggaggaacttcgctgatatcgatgactcatgggcctccataaagagcatcttggactggaccagtcggaatcaggagcgaattgtggatgtcgcaggccctggaggatggaacgatccagacatgctggtgatcggcaattttggcctctcttgggaccagcaggttacccaaatggctctgtgggcaattatggccggtcctcttttcatgagcaacgatctgcgcgcgatctcaccacaggcaaaggccctgctccaagacaaagatgtgatagccatcaatcaggacccgttgggaaagcagggctaccagctgagaaaaggcgacaactttgaggtctgggaaaggcctttgagtggagatgcgtgggctgtggccattattaatcggcaagagatcggaggtccacgctcctatacaatttttgtagcatctcttggcaagggcgttgcctgtaacccagcttgcttcatcactcagcttctgccggtgaagagaaaactgggtttctacgaagctaccagcaggctccgatcccacatcaaccctacaggaaccgtcctcttgcagctggagaatacgatgcagacttcactgaaggacctcctg

SEQ ID NO: 1534 - protein, 398 aa, Artificial Sequence
  variant of human alpha-galactosidase A
LDNGLARTPPMGWLHWERFMCNLDCQEEPDSCISEKLFEEMAERMVTEGWKDAGYEYLCIDDCWMAPQRDSEGRLQADPQRFPHGIRQLANHVHSKGLKLGIYADVGNKTCAGFPGSFGYYDIDAQTFADWGVDLLKFDGCYCDSLENLADGYKHMSLALNRTGRPIVYSCEWPLYMWPFQKPNYTEIRQYCNHWRNFADIDDSWASIKSILDWTSRNQERIVDVAGPGGWNDPDMLVIGNFGLSWDQQVTQMALWAIMAGPLFMSNDLRAISPQAKALLQDKDVIAINQDPLGKQGYQLRKGDNFEVWERPLSGDAWAVAIINRQEIGGPRSYTIFVASLGKGVACNPACFITQLLPVKRKLGFYEATSRLRSHINPTGTVLLQLENTMQTSLKDLL

SEQ ID NO: 1535 - DNA, 1194 bp, Artificial Sequence
  variant of human alpha-galactosidase A
ctggataatggattggctagaacacctcctatggggtggcttcactgggagaggttcatgtgcaacctggactgtcaggaagaaccagacagctgcatctccgagaagctctttgaggaaatggccgaacgaatggtgactgagggctggaaagatgcaggttacgagtatctgtgtattgacgattgctggatggccccacaacgggattctgagggaagacttcaggctgatccgcagcgcttccctcatggcataaggcagctggcaaaccacgtccacagtaaggggctcaaattgggaatctacgcggacgtgggcaataagacctgtgccggttttccgggatcattcgggtattatgacattgacgcccaaacgtttgctgattggggcgttgacctgctgaaattcgatggttgctactgtgacagcctcgaaaacctggcagacggctacaagcatatgtctctcgccctgaatagaaccggtcggccaatcgtatattcctgcgagtggcctctttacatgtggccatttcagaaaccgaactacacagaaattcgccagtattgcaatcattggaggaacttcgctgatatcgatgactcatgggcctccataaagagcatcttggactggaccagtcggaatcaggagcgaattgtggatgtcgcaggccctggaggatggaacgatccagacatgctggtgatcggcaattttggcctctcttgggaccagcaggttacccaaatggctctgtgggcaattatggccggtcctcttttcatgagcaacgatctgcgcgcgatctcaccacaggcaaaggccctgctccaagacaaagatgtgatagccatcaatcaggacccgttgggaaagcagggctaccagctgagaaaaggcgacaactttgaggtctgggaaaggcctttgagtggagatgcgtgggctgtggccattattaatcggcaagagatcggaggtccacgctcctatacaattggggtagcatctcttggcaagggcgttgcctgtaacccagcttgcttcatcactcagcttctgccggtgaagagaaaactgggtttctacgaagctaccagcaggctccgatcccacatcaaccctacaggaaccgtcctcttgcagctggagaatacgatgcagacttcactgaaggacctcctg

SEQ ID NO: 1536 - protein, 398 aa, Artificial Sequence
  variant of human alpha-galactosidase A
LDNGLARTPPMGWLHWERFMCNLDCQEEPDSCISEKLFEEMAERMVTEGWKDAGYEYLCIDDCWMAPQRDSEGRLQADPQRFPHGIRQLANHVHSKGLKLGIYADVGNKTCAGFPGSFGYYDIDAQTFADWGVDLLKFDGCYCDSLENLADGYKHMSLALNRTGRPIVYSCEWPLYMWPFQKPNYTEIRQYCNHWRNFADIDDSWASIKSILDWTSRNQERIVDVAGPGGWNDPDMLVIGNFGLSWDQQVTQMALWAIMAGPLFMSNDLRAISPQAKALLQDKDVIAINQDPLGKQGYQLRKGDNFEVWERPLSGDAWAVAIINRQEIGGPRSYTIGVASLGKGVACNPACFITQLLPVKRKLGFYEATSRLRSHINPTGTVLLQLENTMQTSLKDLL

SEQ ID NO: 1537 - DNA, 1194 bp, Artificial Sequence
  variant of human alpha-galactosidase A
ctggataatggattggctagaacacctcctatggggtggcttcactgggagaggttcatgtgcaacctggactgtcaggaagaaccagacagctgcatctccgagaagctctttgaggaaatggccgaacgaatggtgactgagggctggaaagatgcaggttacgagtatctgtgtattgacgattgctggatggccccacaacgggattctgagggaagacttcaggctgatccgcagcgcttccctcatggcataaggcagctggcaaaccacgtccacagtaaggggctcaaattgggaatctacgcggacgtgggcaataagacctgtgccggttttccgggatcattcgggtattatgacattgacgcccaaacgtttgctgattggggcgttgacctgctgaaattcgatggttgctactgtgacagcctcgaaaacctggcagacggctacaagcatatgtctctcgccctgaatagaaccggtcggccaatcgtatattcctgcgagtggcctctttacatgtggccatttcagaaaccgaactacacagaaattcgccagtattgcaatcattggaggaacttcgctgatatcgatgactcatgggcctccataaagagcatcttggactggaccagtcggaatcaggagcgaattgtggatgtcgcaggccctggaggatggaacgatccagacatgctggtgatcggcaattttggcctctcttgggaccagcaggttacccaaatggctctgtgggcaattatggccggtcctcttttcatgagcaacgatctgcgcgcgatctcaccacaggcaaaggccctgctccaagacaaagatgtgatagccatcaatcaggacccgttgggaaagcagggctaccagctgagaaaaggcgacaactttgaggtctgggaaaggcctttgagtggagatgcgtgggctgtggccattattaatcggcaagagatcggaggtccacgctcctatacaattcacgtagcatctcttggcaagggcgttgcctgtaacccagcttgcttcatcactcagcttctgccggtgaagagaaaactgggtttctacgaagctaccagcaggctccgatcccacatcaaccctacaggaaccgtcctcttgcagctggagaatacgatgcagacttcactgaaggacctcctg

SEQ ID NO: 1538 - protein, 398 aa, Artificial Sequence
  variant of human alpha-galactosidase A
LDNGLARTPPMGWLHWERFMCNLDCQEEPDSCISEKLFEEMAERMVTEGWKDAGYEYLCIDDCWMAPQRDSEGRLQADPQRFPHGIRQLANHVHSKGLKLGIYADVGNKTCAGFPGSFGYYDIDAQTFADWGVDLLKFDGCYCDSLENLADGYKHMSLALNRTGRPIVYSCEWPLYMWPFQKPNYTEIRQYCNHWRNFADIDDSWASIKSILDWTSRNQERIVDVAGPGGWNDPDMLVIGNFGLSWDQQVTQMALWAIMAGPLFMSNDLRAISPQAKALLQDKDVIAINQDPLGKQGYQLRKGDNFEVWERPLSGDAWAVAIINRQEIGGPRSYTIHVASLGKGVACNPACFITQLLPVKRKLGFYEATSRLRSHINPTGTVLLQLENTMQTSLKDLL

SEQ ID NO: 1539 - DNA, 1194 bp, Artificial Sequence
  variant of human alpha-galactosidase A
ctggataatggattggctagaacacctcctatggggtggcttcactgggagaggttcatgtgcaacctggactgtcaggaagaaccagacagctgcatctccgagaagctctttgaggaaatggccgaacgaatggtgactgagggctggaaagatgcaggttacgagtatctgtgtattgacgattgctggatggccccacaacgggattctgagggaagacttcaggctgatccgcagcgcttccctcatggcataaggcagctggcaaaccacgtccacagtaaggggctcaaattgggaatctacgcggacgtgggcaataagacctgtgccggttttccgggatcattcgggtattatgacattgacgcccaaacgtttgctgattggggcgttgacctgctgaaattcgatggttgctactgtgacagcctcgaaaacctggcagacggctacaagcatatgtctctcgccctgaatagaaccggtcggccaatcgtatattcctgcgagtggcctctttacatgtggccatttcagaaaccgaactacacagaaattcgccagtattgcaatcattggaggaacttcgctgatatcgatgactcatgggcctccataaagagcatcttggactggaccagtcggaatcaggagcgaattgtggatgtcgcaggccctggaggatggaacgatccagacatgctggtgatcggcaattttggcctctcttgggaccagcaggttacccaaatggctctgtgggcaattatggccggtcctcttttcatgagcaacgatctgcgcgcgatctcaccacaggcaaaggccctgctccaagacaaagatgtgatagccatcaatcaggacccgttgggaaagcagggctaccagctgagaaaaggcgacaactttgaggtctgggaaaggcctttgagtggagatgcgtgggctgtggccattattaatcggcaagagatcggaggtccacgctcctatacaattattgtagcatctcttggcaagggcgttgcctgtaacccagcttgcttcatcactcagcttctgccggtgaagagaaaactgggtttctacgaagctaccagcaggctccgatcccacatcaaccctacaggaaccgtcctcttgcagctggagaatacgatgcagacttcactgaaggacctcctg

SEQ ID NO: 1540 - protein, 398 aa, Artificial Sequence
  variant of human alpha-galactosidase A
LDNGLARTPPMGWLHWERFMCNLDCQEEPDSCISEKLFEEMAERMVTEGWKDAGYEYLCIDDCWMAPQRDSEGRLQADPQRFPHGIRQLANHVHSKGLKLGIYADVGNKTCAGFPGSFGYYDIDAQTFADWGVDLLKFDGCYCDSLENLADGYKHMSLALNRTGRPIVYSCEWPLYMWPFQKPNYTEIRQYCNHWRNFADIDDSWASIKSILDWTSRNQERIVDVAGPGGWNDPDMLVIGNFGLSWDQQVTQMALWAIMAGPLFMSNDLRAISPQAKALLQDKDVIAINQDPLGKQGYQLRKGDNFEVWERPLSGDAWAVAIINRQEIGGPRSYTIIVASLGKGVACNPACFITQLLPVKRKLGFYEATSRLRSHINPTGTVLLQLENTMQTSLKDLL

SEQ ID NO: 1541 - DNA, 1194 bp, Artificial Sequence
  variant of human alpha-galactosidase A
ctggataatggattggctagaacacctcctatggggtggcttcactgggagaggttcatgtgcaacctggactgtcaggaagaaccagacagctgcatctccgagaagctctttgaggaaatggccgaacgaatggtgactgagggctggaaagatgcaggttacgagtatctgtgtattgacgattgctggatggccccacaacgggattctgagggaagacttcaggctgatccgcagcgcttccctcatggcataaggcagctggcaaaccacgtccacagtaaggggctcaaattgggaatctacgcggacgtgggcaataagacctgtgccggttttccgggatcattcgggtattatgacattgacgcccaaacgtttgctgattggggcgttgacctgctgaaattcgatggttgctactgtgacagcctcgaaaacctggcagacggctacaagcatatgtctctcgccctgaatagaaccggtcggccaatcgtatattcctgcgagtggcctctttacatgtggccatttcagaaaccgaactacacagaaattcgccagtattgcaatcattggaggaacttcgctgatatcgatgactcatgggcctccataaagagcatcttggactggaccagtcggaatcaggagcgaattgtggatgtcgcaggccctggaggatggaacgatccagacatgctggtgatcggcaattttggcctctcttgggaccagcaggttacccaaatggctctgtgggcaattatggccggtcctcttttcatgagcaacgatctgcgcgcgatctcaccacaggcaaaggccctgctccaagacaaagatgtgatagccatcaatcaggacccgttgggaaagcagggctaccagctgagaaaaggcgacaactttgaggtctgggaaaggcctttgagtggagatgcgtgggctgtggccattattaatcggcaagagatcggaggtccacgctcctatacaattaaggtagcatctcttggcaagggcgttgcctgtaacccagcttgcttcatcactcagcttctgccggtgaagagaaaactgggtttctacgaagctaccagcaggctccgatcccacatcaaccctacaggaaccgtcctcttgcagctggagaatacgatgcagacttcactgaaggacctcctg

SEQ ID NO: 1542 - protein, 398 aa, Artificial Sequence
  variant of human alpha-galactosidase A
LDNGLARTPPMGWLHWERFMCNLDCQEEPDSCISEKLFEEMAERMVTEGWKDAGYEYLCIDDCWMAPQRDSEGRLQADPQRFPHGIRQLANHVHSKGLKLGIYADVGNKTCAGFPGSFGYYDIDAQTFADWGVDLLKFDGCYCDSLENLADGYKHMSLALNRTGRPIVYSCEWPLYMWPFQKPNYTEIRQYCNHWRNFADIDDSWASIKSILDWTSRNQERIVDVAGPGGWNDPDMLVIGNFGLSWDQQVTQMALWAIMAGPLFMSNDLRAISPQAKALLQDKDVIAINQDPLGKQGYQLRKGDNFEVWERPLSGDAWAVAIINRQEIGGPRSYTIKVASLGKGVACNPACFITQLLPVKRKLGFYEATSRLRSHINPTGTVLLQLENTMQTSLKDLL

SEQ ID NO: 1543 - DNA, 1194 bp, Artificial Sequence
  variant of human alpha-galactosidase A
ctggataatggattggctagaacacctcctatggggtggcttcactgggagaggttcatgtgcaacctggactgtcaggaagaaccagacagctgcatctccgagaagctctttgaggaaatggccgaacgaatggtgactgagggctggaaagatgcaggttacgagtatctgtgtattgacgattgctggatggccccacaacgggattctgagggaagacttcaggctgatccgcagcgcttccctcatggcataaggcagctggcaaaccacgtccacagtaaggggctcaaattgggaatctacgcggacgtgggcaataagacctgtgccggttttccgggatcattcgggtattatgacattgacgcccaaacgtttgctgattggggcgttgacctgctgaaattcgatggttgctactgtgacagcctcgaaaacctggcagacggctacaagcatatgtctctcgccctgaatagaaccggtcggccaatcgtatattcctgcgagtggcctctttacatgtggccatttcagaaaccgaactacacagaaattcgccagtattgcaatcattggaggaacttcgctgatatcgatgactcatgggcctccataaagagcatcttggactggaccagtcggaatcaggagcgaattgtggatgtcgcaggccctggaggatggaacgatccagacatgctggtgatcggcaattttggcctctcttgggaccagcaggttacccaaatggctctgtgggcaattatggccggtcctcttttcatgagcaacgatctgcgcgcgatctcaccacaggcaaaggccctgctccaagacaaagatgtgatagccatcaatcaggacccgttgggaaagcagggctaccagctgagaaaaggcgacaactttgaggtctgggaaaggcctttgagtggagatgcgtgggctgtggccattattaatcggcaagagatcggaggtccacgctcctatacaattttggtagcatctcttggcaagggcgttgcctgtaacccagcttgcttcatcactcagcttctgccggtgaagagaaaactgggtttctacgaagctaccagcaggctccgatcccacatcaaccctacaggaaccgtcctcttgcagctggagaatacgatgcagacttcactgaaggacctcctg

SEQ ID NO: 1544 - protein, 398 aa, Artificial Sequence
  variant of human alpha-galactosidase A
LDNGLARTPPMGWLHWERFMCNLDCQEEPDSCISEKLFEEMAERMVTEGWKDAGYEYLCIDDCWMAPQRDSEGRLQADPQRFPHGIRQLANHVHSKGLKLGIYADVGNKTCAGFPGSFGYYDIDAQTFADWGVDLLKFDGCYCDSLENLADGYKHMSLALNRTGRPIVYSCEWPLYMWPFQKPNYTEIRQYCNHWRNFADIDDSWASIKSILDWTSRNQERIVDVAGPGGWNDPDMLVIGNFGLSWDQQVTQMALWAIMAGPLFMSNDLRAISPQAKALLQDKDVIAINQDPLGKQGYQLRKGDNFEVWERPLSGDAWAVAIINRQEIGGPRSYTILVASLGKGVACNPACFITQLLPVKRKLGFYEATSRLRSHINPTGTVLLQLENTMQTSLKDLL

SEQ ID NO: 1545 - DNA, 1194 bp, Artificial Sequence
  variant of human alpha-galactosidase A
ctggataatggattggctagaacacctcctatggggtggcttcactgggagaggttcatgtgcaacctggactgtcaggaagaaccagacagctgcatctccgagaagctctttgaggaaatggccgaacgaatggtgactgagggctggaaagatgcaggttacgagtatctgtgtattgacgattgctggatggccccacaacgggattctgagggaagacttcaggctgatccgcagcgcttccctcatggcataaggcagctggcaaaccacgtccacagtaaggggctcaaattgggaatctacgcggacgtgggcaataagacctgtgccggttttccgggatcattcgggtattatgacattgacgcccaaacgtttgctgattggggcgttgacctgctgaaattcgatggttgctactgtgacagcctcgaaaacctggcagacggctacaagcatatgtctctcgccctgaatagaaccggtcggccaatcgtatattcctgcgagtggcctctttacatgtggccatttcagaaaccgaactacacagaaattcgccagtattgcaatcattggaggaacttcgctgatatcgatgactcatgggcctccataaagagcatcttggactggaccagtcggaatcaggagcgaattgtggatgtcgcaggccctggaggatggaacgatccagacatgctggtgatcggcaattttggcctctcttgggaccagcaggttacccaaatggctctgtgggcaattatggccggtcctcttttcatgagcaacgatctgcgcgcgatctcaccacaggcaaaggccctgctccaagacaaagatgtgatagccatcaatcaggacccgttgggaaagcagggctaccagctgagaaaaggcgacaactttgaggtctgggaaaggcctttgagtggagatgcgtgggctgtggccattattaatcggcaagagatcggaggtccacgctcctatacaattatggtagcatctcttggcaagggcgttgcctgtaacccagcttgcttcatcactcagcttctgccggtgaagagaaaactgggtttctacgaagctaccagcaggctccgatcccacatcaaccctacaggaaccgtcctcttgcagctggagaatacgatgcagacttcactgaaggacctcctg

SEQ ID NO: 1546 - protein, 398 aa, Artificial Sequence
  variant of human alpha-galactosidase A
LDNGLARTPPMGWLHWERFMCNLDCQEEPDSCISEKLFEEMAERMVTEGWKDAGYEYLCIDDCWMAPQRDSEGRLQADPQRFPHGIRQLANHVHSKGLKLGIYADVGNKTCAGFPGSFGYYDIDAQTFADWGVDLLKFDGCYCDSLENLADGYKHMSLALNRTGRPIVYSCEWPLYMWPFQKPNYTEIRQYCNHWRNFADIDDSWASIKSILDWTSRNQERIVDVAGPGGWNDPDMLVIGNFGLSWDQQVTQMALWAIMAGPLFMSNDLRAISPQAKALLQDKDVIAINQDPLGKQGYQLRKGDNFEVWERPLSGDAWAVAIINRQEIGGPRSYTIMVASLGKGVACNPACFITQLLPVKRKLGFYEATSRLRSHINPTGTVLLQLENTMQTSLKDLL

SEQ ID NO: 1547 - DNA, 1194 bp, Artificial Sequence
  variant of human alpha-galactosidase A
ctggataatggattggctagaacacctcctatggggtggcttcactgggagaggttcatgtgcaacctggactgtcaggaagaaccagacagctgcatctccgagaagctctttgaggaaatggccgaacgaatggtgactgagggctggaaagatgcaggttacgagtatctgtgtattgacgattgctggatggccccacaacgggattctgagggaagacttcaggctgatccgcagcgcttccctcatggcataaggcagctggcaaaccacgtccacagtaaggggctcaaattgggaatctacgcggacgtgggcaataagacctgtgccggttttccgggatcattcgggtattatgacattgacgcccaaacgtttgctgattggggcgttgacctgctgaaattcgatggttgctactgtgacagcctcgaaaacctggcagacggctacaagcatatgtctctcgccctgaatagaaccggtcggccaatcgtatattcctgcgagtggcctctttacatgtggccatttcagaaaccgaactacacagaaattcgccagtattgcaatcattggaggaacttcgctgatatcgatgactcatgggcctccataaagagcatcttggactggaccagtcggaatcaggagcgaattgtggatgtcgcaggccctggaggatggaacgatccagacatgctggtgatcggcaattttggcctctcttgggaccagcaggttacccaaatggctctgtgggcaattatggccggtcctcttttcatgagcaacgatctgcgcgcgatctcaccacaggcaaaggccctgctccaagacaaagatgtgatagccatcaatcaggacccgttgggaaagcagggctaccagctgagaaaaggcgacaactttgaggtctgggaaaggcctttgagtggagatgcgtgggctgtggccattattaatcggcaagagatcggaggtccacgctcctatacaattaatgtagcatctcttggcaagggcgttgcctgtaacccagcttgcttcatcactcagcttctgccggtgaagagaaaactgggtttctacgaagctaccagcaggctccgatcccacatcaaccctacaggaaccgtcctcttgcagctggagaatacgatgcagacttcactgaaggacctcctg

SEQ ID NO: 1548 - protein, 398 aa, Artificial Sequence
  variant of human alpha-galactosidase A
LDNGLARTPPMGWLHWERFMCNLDCQEEPDSCISEKLFEEMAERMVTEGWKDAGYEYLCIDDCWMAPQRDSEGRLQADPQRFPHGIRQLANHVHSKGLKLGIYADVGNKTCAGFPGSFGYYDIDAQTFADWGVDLLKFDGCYCDSLENLADGYKHMSLALNRTGRPIVYSCEWPLYMWPFQKPNYTEIRQYCNHWRNFADIDDSWASIKSILDWTSRNQERIVDVAGPGGWNDPDMLVIGNFGLSWDQQVTQMALWAIMAGPLFMSNDLRAISPQAKALLQDKDVIAINQDPLGKQGYQLRKGDNFEVWERPLSGDAWAVAIINRQEIGGPRSYTINVASLGKGVACNPACFITQLLPVKRKLGFYEATSRLRSHINPTGTVLLQLENTMQTSLKDLL

SEQ ID NO: 1549 - DNA, 1194 bp, Artificial Sequence
  variant of human alpha-galactosidase A
ctggataatggattggctagaacacctcctatggggtggcttcactgggagaggttcatgtgcaacctggactgtcaggaagaaccagacagctgcatctccgagaagctctttgaggaaatggccgaacgaatggtgactgagggctggaaagatgcaggttacgagtatctgtgtattgacgattgctggatggccccacaacgggattctgagggaagacttcaggctgatccgcagcgcttccctcatggcataaggcagctggcaaaccacgtccacagtaaggggctcaaattgggaatctacgcggacgtgggcaataagacctgtgccggttttccgggatcattcgggtattatgacattgacgcccaaacgtttgctgattggggcgttgacctgctgaaattcgatggttgctactgtgacagcctcgaaaacctggcagacggctacaagcatatgtctctcgccctgaatagaaccggtcggccaatcgtatattcctgcgagtggcctctttacatgtggccatttcagaaaccgaactacacagaaattcgccagtattgcaatcattggaggaacttcgctgatatcgatgactcatgggcctccataaagagcatcttggactggaccagtcggaatcaggagcgaattgtggatgtcgcaggccctggaggatggaacgatccagacatgctggtgatcggcaattttggcctctcttgggaccagcaggttacccaaatggctctgtgggcaattatggccggtcctcttttcatgagcaacgatctgcgcgcgatctcaccacaggcaaaggccctgctccaagacaaagatgtgatagccatcaatcaggacccgttgggaaagcagggctaccagctgagaaaaggcgacaactttgaggtctgggaaaggcctttgagtggagatgcgtgggctgtggccattattaatcggcaagagatcggaggtccacgctcctatacaattcaggtagcatctcttggcaagggcgttgcctgtaacccagcttgcttcatcactcagcttctgccggtgaagagaaaactgggtttctacgaagctaccagcaggctccgatcccacatcaaccctacaggaaccgtcctcttgcagctggagaatacgatgcagacttcactgaaggacctcctg

SEQ ID NO: 1550 - protein, 398 aa, Artificial Sequence
  variant of human alpha-galactosidase A
LDNGLARTPPMGWLHWERFMCNLDCQEEPDSCISEKLFEEMAERMVTEGWKDAGYEYLCIDDCWMAPQRDSEGRLQADPQRFPHGIRQLANHVHSKGLKLGIYADVGNKTCAGFPGSFGYYDIDAQTFADWGVDLLKFDGCYCDSLENLADGYKHMSLALNRTGRPIVYSCEWPLYMWPFQKPNYTEIRQYCNHWRNFADIDDSWASIKSILDWTSRNQERIVDVAGPGGWNDPDMLVIGNFGLSWDQQVTQMALWAIMAGPLFMSNDLRAISPQAKALLQDKDVIAINQDPLGKQGYQLRKGDNFEVWERPLSGDAWAVAIINRQEIGGPRSYTIQVASLGKGVACNPACFITQLLPVKRKLGFYEATSRLRSHINPTGTVLLQLENTMQTSLKDLL

SEQ ID NO: 1551 - DNA, 1194 bp, Artificial Sequence
  variant of human alpha-galactosidase A
ctggataatggattggctagaacacctcctatggggtggcttcactgggagaggttcatgtgcaacctggactgtcaggaagaaccagacagctgcatctccgagaagctctttgaggaaatggccgaacgaatggtgactgagggctggaaagatgcaggttacgagtatctgtgtattgacgattgctggatggccccacaacgggattctgagggaagacttcaggctgatccgcagcgcttccctcatggcataaggcagctggcaaaccacgtccacagtaaggggctcaaattgggaatctacgcggacgtgggcaataagacctgtgccggttttccgggatcattcgggtattatgacattgacgcccaaacgtttgctgattggggcgttgacctgctgaaattcgatggttgctactgtgacagcctcgaaaacctggcagacggctacaagcatatgtctctcgccctgaatagaaccggtcggccaatcgtatattcctgcgagtggcctctttacatgtggccatttcagaaaccgaactacacagaaattcgccagtattgcaatcattggaggaacttcgctgatatcgatgactcatgggcctccataaagagcatcttggactggaccagtcggaatcaggagcgaattgtggatgtcgcaggccctggaggatggaacgatccagacatgctggtgatcggcaattttggcctctcttgggaccagcaggttacccaaatggctctgtgggcaattatggccggtcctcttttcatgagcaacgatctgcgcgcgatctcaccacaggcaaaggccctgctccaagacaaagatgtgatagccatcaatcaggacccgttgggaaagcagggctaccagctgagaaaaggcgacaactttgaggtctgggaaaggcctttgagtggagatgcgtgggctgtggccattattaatcggcaagagatcggaggtccacgctcctatacaattagggtagcatctcttggcaagggcgttgcctgtaacccagcttgcttcatcactcagcttctgccggtgaagagaaaactgggtttctacgaagctaccagcaggctccgatcccacatcaaccctacaggaaccgtcctcttgcagctggagaatacgatgcagacttcactgaaggacctcctg

SEQ ID NO: 1552 - protein, 398 aa, Artificial Sequence; identical to SEQ ID NO: 238
  variant of human alpha-galactosidase A

SEQ ID NO: 1553 - DNA, 1194 bp, Artificial Sequence
  variant of human alpha-galactosidase A
ctggataatggattggctagaacacctcctatggggtggcttcactgggagaggttcatgtgcaacctggactgtcaggaagaaccagacagctgcatctccgagaagctctttgaggaaatggccgaacgaatggtgactgagggctggaaagatgcaggttacgagtatctgtgtattgacgattgctggatggccccacaacgggattctgagggaagacttcaggctgatccgcagcgcttccctcatggcataaggcagctggcaaaccacgtccacagtaaggggctcaaattgggaatctacgcggacgtgggcaataagacctgtgccggttttccgggatcattcgggtattatgacattgacgcccaaacgtttgctgattggggcgttgacctgctgaaattcgatggttgctactgtgacagcctcgaaaacctggcagacggctacaagcatatgtctctcgccctgaatagaaccggtcggccaatcgtatattcctgcgagtggcctctttacatgtggccatttcagaaaccgaactacacagaaattcgccagtattgcaatcattggaggaacttcgctgatatcgatgactcatgggcctccataaagagcatcttggactggaccagtcggaatcaggagcgaattgtggatgtcgcaggccctggaggatggaacgatccagacatgctggtgatcggcaattttggcctctcttgggaccagcaggttacccaaatggctctgtgggcaattatggccggtcctcttttcatgagcaacgatctgcgcgcgatctcaccacaggcaaaggccctgctccaagacaaagatgtgatagccatcaatcaggacccgttgggaaagcagggctaccagctgagaaaaggcgacaactttgaggtctgggaaaggcctttgagtggagatgcgtgggctgtggccattattaatcggcaagagatcggaggtccacgctcctatacaattagtgtagcatctcttggcaagggcgttgcctgtaacccagcttgcttcatcactcagcttctgccggtgaagagaaaactgggtttctacgaagctaccagcaggctccgatcccacatcaaccctacaggaaccgtcctcttgcagctggagaatacgatgcagacttcactgaaggacctcctg

SEQ ID NO: 1554 - protein, 398 aa, Artificial Sequence
  variant of human alpha-galactosidase A
LDNGLARTPPMGWLHWERFMCNLDCQEEPDSCISEKLFEEMAERMVTEGWKDAGYEYLCIDDCWMAPQRDSEGRLQADPQRFPHGIRQLANHVHSKGLKLGIYADVGNKTCAGFPGSFGYYDIDAQTFADWGVDLLKFDGCYCDSLENLADGYKHMSLALNRTGRPIVYSCEWPLYMWPFQKPNYTEIRQYCNHWRNFADIDDSWASIKSILDWTSRNQERIVDVAGPGGWNDPDMLVIGNFGLSWDQQVTQMALWAIMAGPLFMSNDLRAISPQAKALLQDKDVIAINQDPLGKQGYQLRKGDNFEVWERPLSGDAWAVAIINRQEIGGPRSYTISVASLGKGVACNPACFITQLLPVKRKLGFYEATSRLRSHINPTGTVLLQLENTMQTSLKDLL

SEQ ID NO: 1555 - DNA, 1194 bp, Artificial Sequence
  variant of human alpha-galactosidase A
ctggataatggattggctagaacacctcctatggggtggcttcactgggagaggttcatgtgcaacctggactgtcaggaagaaccagacagctgcatctccgagaagctctttgaggaaatggccgaacgaatggtgactgagggctggaaagatgcaggttacgagtatctgtgtattgacgattgctggatggccccacaacgggattctgagggaagacttcaggctgatccgcagcgcttccctcatggcataaggcagctggcaaaccacgtccacagtaaggggctcaaattgggaatctacgcggacgtgggcaataagacctgtgccggttttccgggatcattcgggtattatgacattgacgcccaaacgtttgctgattggggcgttgacctgctgaaattcgatggttgctactgtgacagcctcgaaaacctggcagacggctacaagcatatgtctctcgccctgaatagaaccggtcggccaatcgtatattcctgcgagtggcctctttacatgtggccatttcagaaaccgaactacacagaaattcgccagtattgcaatcattggaggaacttcgctgatatcgatgactcatgggcctccataaagagcatcttggactggaccagtcggaatcaggagcgaattgtggatgtcgcaggccctggaggatggaacgatccagacatgctggtgatcggcaattttggcctctcttgggaccagcaggttacccaaatggctctgtgggcaattatggccggtcctcttttcatgagcaacgatctgcgcgcgatctcaccacaggcaaaggccctgctccaagacaaagatgtgatagccatcaatcaggacccgttgggaaagcagggctaccagctgagaaaaggcgacaactttgaggtctgggaaaggcctttgagtggagatgcgtgggctgtggccattattaatcggcaagagatcggaggtccacgctcctatacaattacggtagcatctcttggcaagggcgttgcctgtaacccagcttgcttcatcactcagcttctgccggtgaagagaaaactgggtttctacgaagctaccagcaggctccgatcccacatcaaccctacaggaaccgtcctcttgcagctggagaatacgatgcagacttcactgaaggacctcctg

SEQ ID NO: 1556 - protein, 398 aa, Artificial Sequence
  variant of human alpha-galactosidase A
LDNGLARTPPMGWLHWERFMCNLDCQEEPDSCISEKLFEEMAERMVTEGWKDAGYEYLCIDDCWMAPQRDSEGRLQADPQRFPHGIRQLANHVHSKGLKLGIYADVGNKTCAGFPGSFGYYDIDAQTFADWGVDLLKFDGCYCDSLENLADGYKHMSLALNRTGRPIVYSCEWPLYMWPFQKPNYTEIRQYCNHWRNFADIDDSWASIKSILDWTSRNQERIVDVAGPGGWNDPDMLVIGNFGLSWDQQVTQMALWAIMAGPLFMSNDLRAISPQAKALLQDKDVIAINQDPLGKQGYQLRKGDNFEVWERPLSGDAWAVAIINRQEIGGPRSYTITVASLGKGVACNPACFITQLLPVKRKLGFYEATSRLRSHINPTGTVLLQLENTMQTSLKDLL

SEQ ID NO: 1557 - DNA, 1194 bp, Artificial Sequence
  variant of human alpha-galactosidase A
ctggataatggattggctagaacacctcctatggggtggcttcactgggagaggttcatgtgcaacctggactgtcaggaagaaccagacagctgcatctccgagaagctctttgaggaaatggccgaacgaatggtgactgagggctggaaagatgcaggttacgagtatctgtgtattgacgattgctggatggccccacaacgggattctgagggaagacttcaggctgatccgcagcgcttccctcatggcataaggcagctggcaaaccacgtccacagtaaggggctcaaattgggaatctacgcggacgtgggcaataagacctgtgccggttttccgggatcattcgggtattatgacattgacgcccaaacgtttgctgattggggcgttgacctgctgaaattcgatggttgctactgtgacagcctcgaaaacctggcagacggctacaagcatatgtctctcgccctgaatagaaccggtcggccaatcgtatattcctgcgagtggcctctttacatgtggccatttcagaaaccgaactacacagaaattcgccagtattgcaatcattggaggaacttcgctgatatcgatgactcatgggcctccataaagagcatcttggactggaccagtcggaatcaggagcgaattgtggatgtcgcaggccctggaggatggaacgatccagacatgctggtgatcggcaattttggcctctcttgggaccagcaggttacccaaatggctctgtgggcaattatggccggtcctcttttcatgagcaacgatctgcgcgcgatctcaccacaggcaaaggccctgctccaagacaaagatgtgatagccatcaatcaggacccgttgggaaagcagggctaccagctgagaaaaggcgacaactttgaggtctgggaaaggcctttgagtggagatgcgtgggctgtggccattattaatcggcaagagatcggaggtccacgctcctatacaattgtggtagcatctcttggcaagggcgttgcctgtaacccagcttgcttcatcactcagcttctgccggtgaagagaaaactgggtttctacgaagctaccagcaggctccgatcccacatcaaccctacaggaaccgtcctcttgcagctggagaatacgatgcagacttcactgaaggacctcctg

SEQ ID NO: 1558 - protein, 398 aa, Artificial Sequence
  variant of human alpha-galactosidase A
LDNGLARTPPMGWLHWERFMCNLDCQEEPDSCISEKLFEEMAERMVTEGWKDAGYEYLCIDDCWMAPQRDSEGRLQADPQRFPHGIRQLANHVHSKGLKLGIYADVGNKTCAGFPGSFGYYDIDAQTFADWGVDLLKFDGCYCDSLENLADGYKHMSLALNRTGRPIVYSCEWPLYMWPFQKPNYTEIRQYCNHWRNFADIDDSWASIKSILDWTSRNQERIVDVAGPGGWNDPDMLVIGNFGLSWDQQVTQMALWAIMAGPLFMSNDLRAISPQAKALLQDKDVIAINQDPLGKQGYQLRKGDNFEVWERPLSGDAWAVAIINRQEIGGPRSYTIVVASLGKGVACNPACFITQLLPVKRKLGFYEATSRLRSHINPTGTVLLQLENTMQTSLKDLL

SEQ ID NO: 1559 - DNA, 1194 bp, Artificial Sequence
  variant of human alpha-galactosidase A
ctggataatggattggctagaacacctcctatggggtggcttcactgggagaggttcatgtgcaacctggactgtcaggaagaaccagacagctgcatctccgagaagctctttgaggaaatggccgaacgaatggtgactgagggctggaaagatgcaggttacgagtatctgtgtattgacgattgctggatggccccacaacgggattctgagggaagacttcaggctgatccgcagcgcttccctcatggcataaggcagctggcaaaccacgtccacagtaaggggctcaaattgggaatctacgcggacgtgggcaataagacctgtgccggttttccgggatcattcgggtattatgacattgacgcccaaacgtttgctgattggggcgttgacctgctgaaattcgatggttgctactgtgacagcctcgaaaacctggcagacggctacaagcatatgtctctcgccctgaatagaaccggtcggccaatcgtatattcctgcgagtggcctctttacatgtggccatttcagaaaccgaactacacagaaattcgccagtattgcaatcattggaggaacttcgctgatatcgatgactcatgggcctccataaagagcatcttggactggaccagtcggaatcaggagcgaattgtggatgtcgcaggccctggaggatggaacgatccagacatgctggtgatcggcaattttggcctctcttgggaccagcaggttacccaaatggctctgtgggcaattatggccggtcctcttttcatgagcaacgatctgcgcgcgatctcaccacaggcaaaggccctgctccaagacaaagatgtgatagccatcaatcaggacccgttgggaaagcagggctaccagctgagaaaaggcgacaactttgaggtctgggaaaggcctttgagtggagatgcgtgggctgtggccattattaatcggcaagagatcggaggtccacgctcctatacaatttgggtagcatctcttggcaagggcgttgcctgtaacccagcttgcttcatcactcagcttctgccggtgaagagaaaactgggtttctacgaagctaccagcaggctccgatcccacatcaaccctacaggaaccgtcctcttgcagctggagaatacgatgcagacttcactgaaggacctcctg

SEQ ID NO: 1560 - protein, 398 aa, Artificial Sequence
  variant of human alpha-galactosidase A
LDNGLARTPPMGWLHWERFMCNLDCQEEPDSCISEKLFEEMAERMVTEGWKDAGYEYLCIDDCWMAPQRDSEGRLQADPQRFPHGIRQLANHVHSKGLKLGIYADVGNKTCAGFPGSFGYYDIDAQTFADWGVDLLKFDGCYCDSLENLADGYKHMSLALNRTGRPIVYSCEWPLYMWPFQKPNYTEIRQYCNHWRNFADIDDSWASIKSILDWTSRNQERIVDVAGPGGWNDPDMLVIGNFGLSWDQQVTQMALWAIMAGPLFMSNDLRAISPQAKALLQDKDVIAINQDPLGKQGYQLRKGDNFEVWERPLSGDAWAVAIINRQEIGGPRSYTIWVASLGKGVACNPACFITQLLPVKRKLGFYEATSRLRSHINPTGTVLLQLENTMQTSLKDLL

SEQ ID NO: 1561 - DNA, 1194 bp, Artificial Sequence
  variant of human alpha-galactosidase A
ctggataatggattggctagaacacctcctatggggtggcttcactgggagaggttcatgtgcaacctggactgtcaggaagaaccagacagctgcatctccgagaagctctttgaggaaatggccgaacgaatggtgactgagggctggaaagatgcaggttacgagtatctgtgtattgacgattgctggatggccccacaacgggattctgagggaagacttcaggctgatccgcagcgcttccctcatggcataaggcagctggcaaaccacgtccacagtaaggggctcaaattgggaatctacgcggacgtgggcaataagacctgtgccggttttccgggatcattcgggtattatgacattgacgcccaaacgtttgctgattggggcgttgacctgctgaaattcgatggttgctactgtgacagcctcgaaaacctggcagacggctacaagcatatgtctctcgccctgaatagaaccggtcggccaatcgtatattcctgcgagtggcctctttacatgtggccatttcagaaaccgaactacacagaaattcgccagtattgcaatcattggaggaacttcgctgatatcgatgactcatgggcctccataaagagcatcttggactggaccagtcggaatcaggagcgaattgtggatgtcgcaggccctggaggatggaacgatccagacatgctggtgatcggcaattttggcctctcttgggaccagcaggttacccaaatggctctgtgggcaattatggccggtcctcttttcatgagcaacgatctgcgcgcgatctcaccacaggcaaaggccctgctccaagacaaagatgtgatagccatcaatcaggacccgttgggaaagcagggctaccagctgagaaaaggcgacaactttgaggtctgggaaaggcctttgagtggagatgcgtgggctgtggccattattaatcggcaagagatcggaggtccacgctcctatacaatttatgtagcatctcttggcaagggcgttgcctgtaacccagcttgcttcatcactcagcttctgccggtgaagagaaaactgggtttctacgaagctaccagcaggctccgatcccacatcaaccctacaggaaccgtcctcttgcagctggagaatacgatgcagacttcactgaaggacctcctg

SEQ ID NO: 1562 - protein, 398 aa, Artificial Sequence
  variant of human alpha-galactosidase A
LDNGLARTPPMGWLHWERFMCNLDCQEEPDSCISEKLFEEMAERMVTEGWKDAGYEYLCIDDCWMAPQRDSEGRLQADPQRFPHGIRQLANHVHSKGLKLGIYADVGNKTCAGFPGSFGYYDIDAQTFADWGVDLLKFDGCYCDSLENLADGYKHMSLALNRTGRPIVYSCEWPLYMWPFQKPNYTEIRQYCNHWRNFADIDDSWASIKSILDWTSRNQERIVDVAGPGGWNDPDMLVIGNFGLSWDQQVTQMALWAIMAGPLFMSNDLRAISPQAKALLQDKDVIAINQDPLGKQGYQLRKGDNFEVWERPLSGDAWAVAIINRQEIGGPRSYTIYVASLGKGVACNPACFITQLLPVKRKLGFYEATSRLRSHINPTGTVLLQLENTMQTSLKDLL

SEQ ID NO: 1563 - DNA, 1194 bp, Artificial Sequence
  variant of human alpha-galactosidase A
ctggataatggattggctagaacacctcctatggggtggcttcactgggagaggttcatgtgcaacctggactgtcaggaagaaccagacagctgcatctccgagaagctctttgaggaaatggccgaacgaatggtgactgagggctggaaagatgcaggttacgagtatctgtgtattgacgattgctggatggccccacaacgggattctgagggaagacttcaggctgatccgcagcgcttccctcatggcataaggcagctggcaaaccacgtccacagtaaggggctcaaattgggaatctacgcggacgtgggcaataagacctgtgccggttttccgggatcattcgggtattatgacattgacgcccaaacgtttgctgattggggcgttgacctgctgaaattcgatggttgctactgtgacagcctcgaaaacctggcagacggctacaagcatatgtctctcgccctgaatagaaccggtcggccaatcgtatattcctgcgagtggcctctttacatgtggccatttcagaaaccgaactacacagaaattcgccagtattgcaatcattggaggaacttcgctgatatcgatgactcatgggcctccataaagagcatcttggactggaccagtgcgaatcaggagcgaattgtggatgtcgcaggccctggaggatggaacgatccagacatgctggtgatcggcaattttggcctctcttgggaccagcaggttacccaaatggctctgtgggcaattatggccggtcctcttttcatgagcaacgatctgcgcgcgatctcaccacaggcaaaggccctgctccaagacaaagatgtgatagccatcaatcaggacccgttgggaaagcagggctaccagctgagaaaaggcgacaactttgaggtctgggaaaggcctttgagtggagatgcgtgggctgtggccattattaatcggcaagagatcggaggtccacgctcctatacaattcctgtagcatctcttggcaagggcgttgcctgtaacccagcttgcttcatcactcagcttctgccggtgaagagaaaactgggtttctacgaagctaccagcaggctccgatcccacatcaaccctacaggaaccgtcctcttgcagctggagaatacgatgcagacttcactgaaggacctcctg

SEQ ID NO: 1564 - protein, 398 aa, Artificial Sequence
  variant of human alpha-galactosidase A
LDNGLARTPPMGWLHWERFMCNLDCQEEPDSCISEKLFEEMAERMVTEGWKDAGYEYLCIDDCWMAPQRDSEGRLQADPQRFPHGIRQLANHVHSKGLKLGIYADVGNKTCAGFPGSFGYYDIDAQTFADWGVDLLKFDGCYCDSLENLADGYKHMSLALNRTGRPIVYSCEWPLYMWPFQKPNYTEIRQYCNHWRNFADIDDSWASIKSILDWTSANQERIVDVAGPGGWNDPDMLVIGNFGLSWDQQVTQMALWAIMAGPLFMSNDLRAISPQAKALLQDKDVIAINQDPLGKQGYQLRKGDNFEVWERPLSGDAWAVAIINRQEIGGPRSYTIPVASLGKGVACNPACFITQLLPVKRKLGFYEATSRLRSHINPTGTVLLQLENTMQTSLKDLL

SEQ ID NO: 1565 - DNA, 1194 bp, Artificial Sequence
  variant of human alpha-galactosidase A
ctggataatggattggctagaacacctcctatggggtggcttcactgggagaggttcatgtgcaacctggactgtcaggaagaaccagacagctgcatctccgagaagctctttgaggaaatggccgaacgaatggtgactgagggctggaaagatgcaggttacgagtatctgtgtattgacgattgctggatggccccacaacgggattctgagggaagacttcaggctgatccgcagcgcttccctcatggcataaggcagctggcaaaccacgtccacagtaaggggctcaaattgggaatctacgcggacgtgggcaataagacctgtgccggttttccgggatcattcgggtattatgacattgacgcccaaacgtttgctgattggggcgttgacctgctgaaattcgatggttgctactgtgacagcctcgaaaacctggcagacggctacaagcatatgtctctcgccctgaatagaaccggtcggccaatcgtatattcctgcgagtggcctctttacatgtggccatttcagaaaccgaactacacagaaattcgccagtattgcaatcattggaggaacttcgctgatatcgatgactcatgggcctccataaagagcatcttggactggaccagttgcaatcaggagcgaattgtggatgtcgcaggccctggaggatggaacgatccagacatgctggtgatcggcaattttggcctctcttgggaccagcaggttacccaaatggctctgtgggcaattatggccggtcctcttttcatgagcaacgatctgcgcgcgatctcaccacaggcaaaggccctgctccaagacaaagatgtgatagccatcaatcaggacccgttgggaaagcagggctaccagctgagaaaaggcgacaactttgaggtctgggaaaggcctttgagtggagatgcgtgggctgtggccattattaatcggcaagagatcggaggtccacgctcctatacaattcctgtagcatctcttggcaagggcgttgcctgtaacccagcttgcttcatcactcagcttctgccggtgaagagaaaactgggtttctacgaagctaccagcaggctccgatcccacatcaaccctacaggaaccgtcctcttgcagctggagaatacgatgcagacttcactgaaggacctcctg

SEQ ID NO: 1566 - protein, 398 aa, Artificial Sequence
  variant of human alpha-galactosidase A
LDNGLARTPPMGWLHWERFMCNLDCQEEPDSCISEKLFEEMAERMVTEGWKDAGYEYLCIDDCWMAPQRDSEGRLQADPQRFPHGIRQLANHVHSKGLKLGIYADVGNKTCAGFPGSFGYYDIDAQTFADWGVDLLKFDGCYCDSLENLADGYKHMSLALNRTGRPIVYSCEWPLYMWPFQKPNYTEIRQYCNHWRNFADIDDSWASIKSILDWTSCNQERIVDVAGPGGWNDPDMLVIGNFGLSWDQQVTQMALWAIMAGPLFMSNDLRAISPQAKALLQDKDVIAINQDPLGKQGYQLRKGDNFEVWERPLSGDAWAVAIINRQEIGGPRSYTIPVASLGKGVACNPACFITQLLPVKRKLGFYEATSRLRSHINPTGTVLLQLENTMQTSLKDLL

SEQ ID NO: 1567 - DNA, 1194 bp, Artificial Sequence
  variant of human alpha-galactosidase A
ctggataatggattggctagaacacctcctatggggtggcttcactgggagaggttcatgtgcaacctggactgtcaggaagaaccagacagctgcatctccgagaagctctttgaggaaatggccgaacgaatggtgactgagggctggaaagatgcaggttacgagtatctgtgtattgacgattgctggatggccccacaacgggattctgagggaagacttcaggctgatccgcagcgcttccctcatggcataaggcagctggcaaaccacgtccacagtaaggggctcaaattgggaatctacgcggacgtgggcaataagacctgtgccggttttccgggatcattcgggtattatgacattgacgcccaaacgtttgctgattggggcgttgacctgctgaaattcgatggttgctactgtgacagcctcgaaaacctggcagacggctacaagcatatgtctctcgccctgaatagaaccggtcggccaatcgtatattcctgcgagtggcctctttacatgtggccatttcagaaaccgaactacacagaaattcgccagtattgcaatcattggaggaacttcgctgatatcgatgactcatgggcctccataaagagcatcttggactggaccagtgataatcaggagcgaattgtggatgtcgcaggccctggaggatggaacgatccagacatgctggtgatcggcaattttggcctctcttgggaccagcaggttacccaaatggctctgtgggcaattatggccggtcctcttttcatgagcaacgatctgcgcgcgatctcaccacaggcaaaggccctgctccaagacaaagatgtgatagccatcaatcaggacccgttgggaaagcagggctaccagctgagaaaaggcgacaactttgaggtctgggaaaggcctttgagtggagatgcgtgggctgtggccattattaatcggcaagagatcggaggtccacgctcctatacaattcctgtagcatctcttggcaagggcgttgcctgtaacccagcttgcttcatcactcagcttctgccggtgaagagaaaactgggtttctacgaagctaccagcaggctccgatcccacatcaaccctacaggaaccgtcctcttgcagctggagaatacgatgcagacttcactgaaggacctcctg

SEQ ID NO: 1568 - protein, 398 aa, Artificial Sequence
  variant of human alpha-galactosidase A
LDNGLARTPPMGWLHWERFMCNLDCQEEPDSCISEKLFEEMAERMVTEGWKDAGYEYLCIDDCWMAPQRDSEGRLQADPQRFPHGIRQLANHVHSKGLKLGIYADVGNKTCAGFPGSFGYYDIDAQTFADWGVDLLKFDGCYCDSLENLADGYKHMSLALNRTGRPIVYSCEWPLYMWPFQKPNYTEIRQYCNHWRNFADIDDSWASIKSILDWTSDNQERIVDVAGPGGWNDPDMLVIGNFGLSWDQQVTQMALWAIMAGPLFMSNDLRAISPQAKALLQDKDVIAINQDPLGKQGYQLRKGDNFEVWERPLSGDAWAVAIINRQEIGGPRSYTIPVASLGKGVACNPACFITQLLPVKRKLGFYEATSRLRSHINPTGTVLLQLENTMQTSLKDLL

SEQ ID NO: 1569 - DNA, 1194 bp, Artificial Sequence
  variant of human alpha-galactosidase A
ctggataatggattggctagaacacctcctatggggtggcttcactgggagaggttcatgtgcaacctggactgtcaggaagaaccagacagctgcatctccgagaagctctttgaggaaatggccgaacgaatggtgactgagggctggaaagatgcaggttacgagtatctgtgtattgacgattgctggatggccccacaacgggattctgagggaagacttcaggctgatccgcagcgcttccctcatggcataaggcagctggcaaaccacgtccacagtaaggggctcaaattgggaatctacgcggacgtgggcaataagacctgtgccggttttccgggatcattcgggtattatgacattgacgcccaaacgtttgctgattggggcgttgacctgctgaaattcgatggttgctactgtgacagcctcgaaaacctggcagacggctacaagcatatgtctctcgccctgaatagaaccggtcggccaatcgtatattcctgcgagtggcctctttacatgtggccatttcagaaaccgaactacacagaaattcgccagtattgcaatcattggaggaacttcgctgatatcgatgactcatgggcctccataaagagcatcttggactggaccagtgagaatcaggagcgaattgtggatgtcgcaggccctggaggatggaacgatccagacatgctggtgatcggcaattttggcctctcttgggaccagcaggttacccaaatggctctgtgggcaattatggccggtcctcttttcatgagcaacgatctgcgcgcgatctcaccacaggcaaaggccctgctccaagacaaagatgtgatagccatcaatcaggacccgttgggaaagcagggctaccagctgagaaaaggcgacaactttgaggtctgggaaaggcctttgagtggagatgcgtgggctgtggccattattaatcggcaagagatcggaggtccacgctcctatacaattcctgtagcatctcttggcaagggcgttgcctgtaacccagcttgcttcatcactcagcttctgccggtgaagagaaaactgggtttctacgaagctaccagcaggctccgatcccacatcaaccctacaggaaccgtcctcttgcagctggagaatacgatgcagacttcactgaaggacctcctg

SEQ ID NO: 1570 - protein, 398 aa, Artificial Sequence
  variant of human alpha-galactosidase A
LDNGLARTPPMGWLHWERFMCNLDCQEEPDSCISEKLFEEMAERMVTEGWKDAGYEYLCIDDCWMAPQRDSEGRLQADPQRFPHGIRQLANHVHSKGLKLGIYADVGNKTCAGFPGSFGYYDIDAQTFADWGVDLLKFDGCYCDSLENLADGYKHMSLALNRTGRPIVYSCEWPLYMWPFQKPNYTEIRQYCNHWRNFADIDDSWASIKSILDWTSENQERIVDVAGPGGWNDPDMLVIGNFGLSWDQQVTQMALWAIMAGPLFMSNDLRAISPQAKALLQDKDVIAINQDPLGKQGYQLRKGDNFEVWERPLSGDAWAVAIINRQEIGGPRSYTIPVASLGKGVACNPACFITQLLPVKRKLGFYEATSRLRSHINPTGTVLLQLENTMQTSLKDLL

SEQ ID NO: 1571 - DNA, 1194 bp, Artificial Sequence
  variant of human alpha-galactosidase A
ctggataatggattggctagaacacctcctatggggtggcttcactgggagaggttcatgtgcaacctggactgtcaggaagaaccagacagctgcatctccgagaagctctttgaggaaatggccgaacgaatggtgactgagggctggaaagatgcaggttacgagtatctgtgtattgacgattgctggatggccccacaacgggattctgagggaagacttcaggctgatccgcagcgcttccctcatggcataaggcagctggcaaaccacgtccacagtaaggggctcaaattgggaatctacgcggacgtgggcaataagacctgtgccggttttccgggatcattcgggtattatgacattgacgcccaaacgtttgctgattggggcgttgacctgctgaaattcgatggttgctactgtgacagcctcgaaaacctggcagacggctacaagcatatgtctctcgccctgaatagaaccggtcggccaatcgtatattcctgcgagtggcctctttacatgtggccatttcagaaaccgaactacacagaaattcgccagtattgcaatcattggaggaacttcgctgatatcgatgactcatgggcctccataaagagcatcttggactggaccagttttaatcaggagcgaattgtggatgtcgcaggccctggaggatggaacgatccagacatgctggtgatcggcaattttggcctctcttgggaccagcaggttacccaaatggctctgtgggcaattatggccggtcctcttttcatgagcaacgatctgcgcgcgatctcaccacaggcaaaggccctgctccaagacaaagatgtgatagccatcaatcaggacccgttgggaaagcagggctaccagctgagaaaaggcgacaactttgaggtctgggaaaggcctttgagtggagatgcgtgggctgtggccattattaatcggcaagagatcggaggtccacgctcctatacaattcctgtagcatctcttggcaagggcgttgcctgtaacccagcttgcttcatcactcagcttctgccggtgaagagaaaactgggtttctacgaagctaccagcaggctccgatcccacatcaaccctacaggaaccgtcctcttgcagctggagaatacgatgcagacttcactgaaggacctcctg

SEQ ID NO: 1572 - protein, 398 aa, Artificial Sequence
  variant of human alpha-galactosidase A
LDNGLARTPPMGWLHWERFMCNLDCQEEPDSCISEKLFEEMAERMVTEGWKDAGYEYLCIDDCWMAPQRDSEGRLQADPQRFPHGIRQLANHVHSKGLKLGIYADVGNKTCAGFPGSFGYYDIDAQTFADWGVDLLKFDGCYCDSLENLADGYKHMSLALNRTGRPIVYSCEWPLYMWPFQKPNYTEIRQYCNHWRNFADIDDSWASIKSILDWTSFNQERIVDVAGPGGWNDPDMLVIGNFGLSWDQQVTQMALWAIMAGPLFMSNDLRAISPQAKALLQDKDVIAINQDPLGKQGYQLRKGDNFEVWERPLSGDAWAVAIINRQEIGGPRSYTIPVASLGKGVACNPACFITQLLPVKRKLGFYEATSRLRSHINPTGTVLLQLENTMQTSLKDLL

SEQ ID NO: 1573 - DNA, 1194 bp, Artificial Sequence
  variant of human alpha-galactosidase A
ctggataatggattggctagaacacctcctatggggtggcttcactgggagaggttcatgtgcaacctggactgtcaggaagaaccagacagctgcatctccgagaagctctttgaggaaatggccgaacgaatggtgactgagggctggaaagatgcaggttacgagtatctgtgtattgacgattgctggatggccccacaacgggattctgagggaagacttcaggctgatccgcagcgcttccctcatggcataaggcagctggcaaaccacgtccacagtaaggggctcaaattgggaatctacgcggacgtgggcaataagacctgtgccggttttccgggatcattcgggtattatgacattgacgcccaaacgtttgctgattggggcgttgacctgctgaaattcgatggttgctactgtgacagcctcgaaaacctggcagacggctacaagcatatgtctctcgccctgaatagaaccggtcggccaatcgtatattcctgcgagtggcctctttacatgtggccatttcagaaaccgaactacacagaaattcgccagtattgcaatcattggaggaacttcgctgatatcgatgactcatgggcctccataaagagcatcttggactggaccagtgggaatcaggagcgaattgtggatgtcgcaggccctggaggatggaacgatccagacatgctggtgatcggcaattttggcctctcttgggaccagcaggttacccaaatggctctgtgggcaattatggccggtcctcttttcatgagcaacgatctgcgcgcgatctcaccacaggcaaaggccctgctccaagacaaagatgtgatagccatcaatcaggacccgttgggaaagcagggctaccagctgagaaaaggcgacaactttgaggtctgggaaaggcctttgagtggagatgcgtgggctgtggccattattaatcggcaagagatcggaggtccacgctcctatacaattcctgtagcatctcttggcaagggcgttgcctgtaacccagcttgcttcatcactcagcttctgccggtgaagagaaaactgggtttctacgaagctaccagcaggctccgatcccacatcaaccctacaggaaccgtcctcttgcagctggagaatacgatgcagacttcactgaaggacctcctg

SEQ ID NO: 1574 - protein, 398 aa, Artificial Sequence
  variant of human alpha-galactosidase A
LDNGLARTPPMGWLHWERFMCNLDCQEEPDSCISEKLFEEMAERMVTEGWKDAGYEYLCIDDCWMAPQRDSEGRLQADPQRFPHGIRQLANHVHSKGLKLGIYADVGNKTCAGFPGSFGYYDIDAQTFADWGVDLLKFDGCYCDSLENLADGYKHMSLALNRTGRPIVYSCEWPLYMWPFQKPNYTEIRQYCNHWRNFADIDDSWASIKSILDWTSGNQERIVDVAGPGGWNDPDMLVIGNFGLSWDQQVTQMALWAIMAGPLFMSNDLRAISPQAKALLQDKDVIAINQDPLGKQGYQLRKGDNFEVWERPLSGDAWAVAIINRQEIGGPRSYTIPVASLGKGVACNPACFITQLLPVKRKLGFYEATSRLRSHINPTGTVLLQLENTMQTSLKDLL

SEQ ID NO: 1575 - DNA, 1194 bp, Artificial Sequence
  variant of human alpha-galactosidase A
ctggataatggattggctagaacacctcctatggggtggcttcactgggagaggttcatgtgcaacctggactgtcaggaagaaccagacagctgcatctccgagaagctctttgaggaaatggccgaacgaatggtgactgagggctggaaagatgcaggttacgagtatctgtgtattgacgattgctggatggccccacaacgggattctgagggaagacttcaggctgatccgcagcgcttccctcatggcataaggcagctggcaaaccacgtccacagtaaggggctcaaattgggaatctacgcggacgtgggcaataagacctgtgccggttttccgggatcattcgggtattatgacattgacgcccaaacgtttgctgattggggcgttgacctgctgaaattcgatggttgctactgtgacagcctcgaaaacctggcagacggctacaagcatatgtctctcgccctgaatagaaccggtcggccaatcgtatattcctgcgagtggcctctttacatgtggccatttcagaaaccgaactacacagaaattcgccagtattgcaatcattggaggaacttcgctgatatcgatgactcatgggcctccataaagagcatcttggactggaccagtcataatcaggagcgaattgtggatgtcgcaggccctggaggatggaacgatccagacatgctggtgatcggcaattttggcctctcttgggaccagcaggttacccaaatggctctgtgggcaattatggccggtcctcttttcatgagcaacgatctgcgcgcgatctcaccacaggcaaaggccctgctccaagacaaagatgtgatagccatcaatcaggacccgttgggaaagcagggctaccagctgagaaaaggcgacaactttgaggtctgggaaaggcctttgagtggagatgcgtgggctgtggccattattaatcggcaagagatcggaggtccacgctcctatacaattcctgtagcatctcttggcaagggcgttgcctgtaacccagcttgcttcatcactcagcttctgccggtgaagagaaaactgggtttctacgaagctaccagcaggctccgatcccacatcaaccctacaggaaccgtcctcttgcagctggagaatacgatgcagacttcactgaaggacctcctg

SEQ ID NO: 1576 - protein, 398 aa, Artificial Sequence
  variant of human alpha-galactosidase A
LDNGLARTPPMGWLHWERFMCNLDCQEEPDSCISEKLFEEMAERMVTEGWKDAGYEYLCIDDCWMAPQRDSEGRLQADPQRFPHGIRQLANHVHSKGLKLGIYADVGNKTCAGFPGSFGYYDIDAQTFADWGVDLLKFDGCYCDSLENLADGYKHMSLALNRTGRPIVYSCEWPLYMWPFQKPNYTEIRQYCNHWRNFADIDDSWASIKSILDWTSHNQERIVDVAGPGGWNDPDMLVIGNFGLSWDQQVTQMALWAIMAGPLFMSNDLRAISPQAKALLQDKDVIAINQDPLGKQGYQLRKGDNFEVWERPLSGDAWAVAIINRQEIGGPRSYTIPVASLGKGVACNPACFITQLLPVKRKLGFYEATSRLRSHINPTGTVLLQLENTMQTSLKDLL

SEQ ID NO: 1577 - DNA, 1194 bp, Artificial Sequence
  variant of human alpha-galactosidase A
ctggataatggattggctagaacacctcctatggggtggcttcactgggagaggttcatgtgcaacctggactgtcaggaagaaccagacagctgcatctccgagaagctctttgaggaaatggccgaacgaatggtgactgagggctggaaagatgcaggttacgagtatctgtgtattgacgattgctggatggccccacaacgggattctgagggaagacttcaggctgatccgcagcgcttccctcatggcataaggcagctggcaaaccacgtccacagtaaggggctcaaattgggaatctacgcggacgtgggcaataagacctgtgccggttttccgggatcattcgggtattatgacattgacgcccaaacgtttgctgattggggcgttgacctgctgaaattcgatggttgctactgtgacagcctcgaaaacctggcagacggctacaagcatatgtctctcgccctgaatagaaccggtcggccaatcgtatattcctgcgagtggcctctttacatgtggccatttcagaaaccgaactacacagaaattcgccagtattgcaatcattggaggaacttcgctgatatcgatgactcatgggcctccataaagagcatcttggactggaccagtattaatcaggagcgaattgtggatgtcgcaggccctggaggatggaacgatccagacatgctggtgatcggcaattttggcctctcttgggaccagcaggttacccaaatggctctgtgggcaattatggccggtcctcttttcatgagcaacgatctgcgcgcgatctcaccacaggcaaaggccctgctccaagacaaagatgtgatagccatcaatcaggacccgttgggaaagcagggctaccagctgagaaaaggcgacaactttgaggtctgggaaaggcctttgagtggagatgcgtgggctgtggccattattaatcggcaagagatcggaggtccacgctcctatacaattcctgtagcatctcttggcaagggcgttgcctgtaacccagcttgcttcatcactcagcttctgccggtgaagagaaaactgggtttctacgaagctaccagcaggctccgatcccacatcaaccctacaggaaccgtcctcttgcagctggagaatacgatgcagacttcactgaaggacctcctg

SEQ ID NO: 1578 - protein, 398 aa, Artificial Sequence
  variant of human alpha-galactosidase A
LDNGLARTPPMGWLHWERFMCNLDCQEEPDSCISEKLFEEMAERMVTEGWKDAGYEYLCIDDCWMAPQRDSEGRLQADPQRFPHGIRQLANHVHSKGLKLGIYADVGNKTCAGFPGSFGYYDIDAQTFADWGVDLLKFDGCYCDSLENLADGYKHMSLALNRTGRPIVYSCEWPLYMWPFQKPNYTEIRQYCNHWRNFADIDDSWASIKSILDWTSINQERIVDVAGPGGWNDPDMLVIGNFGLSWDQQVTQMALWAIMAGPLFMSNDLRAISPQAKALLQDKDVIAINQDPLGKQGYQLRKGDNFEVWERPLSGDAWAVAIINRQEIGGPRSYTIPVASLGKGVACNPACFITQLLPVKRKLGFYEATSRLRSHINPTGTVLLQLENTMQTSLKDLL

SEQ ID NO: 1579 - DNA, 1194 bp, Artificial Sequence
  variant of human alpha-galactosidase A
ctggataatggattggctagaacacctcctatggggtggcttcactgggagaggttcatgtgcaacctggactgtcaggaagaaccagacagctgcatctccgagaagctctttgaggaaatggccgaacgaatggtgactgagggctggaaagatgcaggttacgagtatctgtgtattgacgattgctggatggccccacaacgggattctgagggaagacttcaggctgatccgcagcgcttccctcatggcataaggcagctggcaaaccacgtccacagtaaggggctcaaattgggaatctacgcggacgtgggcaataagacctgtgccggttttccgggatcattcgggtattatgacattgacgcccaaacgtttgctgattggggcgttgacctgctgaaattcgatggttgctactgtgacagcctcgaaaacctggcagacggctacaagcatatgtctctcgccctgaatagaaccggtcggccaatcgtatattcctgcgagtggcctctttacatgtggccatttcagaaaccgaactacacagaaattcgccagtattgcaatcattggaggaacttcgctgatatcgatgactcatgggcctccataaagagcatcttggactggaccagtaagaatcaggagcgaattgtggatgtcgcaggccctggaggatggaacgatccagacatgctggtgatcggcaattttggcctctcttgggaccagcaggttacccaaatggctctgtgggcaattatggccggtcctcttttcatgagcaacgatctgcgcgcgatctcaccacaggcaaaggccctgctccaagacaaagatgtgatagccatcaatcaggacccgttgggaaagcagggctaccagctgagaaaaggcgacaactttgaggtctgggaaaggcctttgagtggagatgcgtgggctgtggccattattaatcggcaagagatcggaggtccacgctcctatacaattcctgtagcatctcttggcaagggcgttgcctgtaacccagcttgcttcatcactcagcttctgccggtgaagagaaaactgggtttctacgaagctaccagcaggctccgatcccacatcaaccctacaggaaccgtcctcttgcagctggagaatacgatgcagacttcactgaaggacctcctg

SEQ ID NO: 1580 - protein, 398 aa, Artificial Sequence; identical to SEQ ID NO: 260
  variant of human alpha-galactosidase A

SEQ ID NO: 1581 - DNA, 1194 bp, Artificial Sequence
  variant of human alpha-galactosidase A
ctggataatggattggctagaacacctcctatggggtggcttcactgggagaggttcatgtgcaacctggactgtcaggaagaaccagacagctgcatctccgagaagctctttgaggaaatggccgaacgaatggtgactgagggctggaaagatgcaggttacgagtatctgtgtattgacgattgctggatggccccacaacgggattctgagggaagacttcaggctgatccgcagcgcttccctcatggcataaggcagctggcaaaccacgtccacagtaaggggctcaaattgggaatctacgcggacgtgggcaataagacctgtgccggttttccgggatcattcgggtattatgacattgacgcccaaacgtttgctgattggggcgttgacctgctgaaattcgatggttgctactgtgacagcctcgaaaacctggcagacggctacaagcatatgtctctcgccctgaatagaaccggtcggccaatcgtatattcctgcgagtggcctctttacatgtggccatttcagaaaccgaactacacagaaattcgccagtattgcaatcattggaggaacttcgctgatatcgatgactcatgggcctccataaagagcatcttggactggaccagtctgaatcaggagcgaattgtggatgtcgcaggccctggaggatggaacgatccagacatgctggtgatcggcaattttggcctctcttgggaccagcaggttacccaaatggctctgtgggcaattatggccggtcctcttttcatgagcaacgatctgcgcgcgatctcaccacaggcaaaggccctgctccaagacaaagatgtgatagccatcaatcaggacccgttgggaaagcagggctaccagctgagaaaaggcgacaactttgaggtctgggaaaggcctttgagtggagatgcgtgggctgtggccattattaatcggcaagagatcggaggtccacgctcctatacaattcctgtagcatctcttggcaagggcgttgcctgtaacccagcttgcttcatcactcagcttctgccggtgaagagaaaactgggtttctacgaagctaccagcaggctccgatcccacatcaaccctacaggaaccgtcctcttgcagctggagaatacgatgcagacttcactgaaggacctcctg

SEQ ID NO: 1582 - protein, 398 aa, Artificial Sequence
  variant of human alpha-galactosidase A
LDNGLARTPPMGWLHWERFMCNLDCQEEPDSCISEKLFEEMAERMVTEGWKDAGYEYLCIDDCWMAPQRDSEGRLQADPQRFPHGIRQLANHVHSKGLKLGIYADVGNKTCAGFPGSFGYYDIDAQTFADWGVDLLKFDGCYCDSLENLADGYKHMSLALNRTGRPIVYSCEWPLYMWPFQKPNYTEIRQYCNHWRNFADIDDSWASIKSILDWTSLNQERIVDVAGPGGWNDPDMLVIGNFGLSWDQQVTQMALWAIMAGPLFMSNDLRAISPQAKALLQDKDVIAINQDPLGKQGYQLRKGDNFEVWERPLSGDAWAVAIINRQEIGGPRSYTIPVASLGKGVACNPACFITQLLPVKRKLGFYEATSRLRSHINPTGTVLLQLENTMQTSLKDLL

SEQ ID NO: 1583 - DNA, 1194 bp, Artificial Sequence
  variant of human alpha-galactosidase A
ctggataatggattggctagaacacctcctatggggtggcttcactgggagaggttcatgtgcaacctggactgtcaggaagaaccagacagctgcatctccgagaagctctttgaggaaatggccgaacgaatggtgactgagggctggaaagatgcaggttacgagtatctgtgtattgacgattgctggatggccccacaacgggattctgagggaagacttcaggctgatccgcagcgcttccctcatggcataaggcagctggcaaaccacgtccacagtaaggggctcaaattgggaatctacgcggacgtgggcaataagacctgtgccggttttccgggatcattcgggtattatgacattgacgcccaaacgtttgctgattggggcgttgacctgctgaaattcgatggttgctactgtgacagcctcgaaaacctggcagacggctacaagcatatgtctctcgccctgaatagaaccggtcggccaatcgtatattcctgcgagtggcctctttacatgtggccatttcagaaaccgaactacacagaaattcgccagtattgcaatcattggaggaacttcgctgatatcgatgactcatgggcctccataaagagcatcttggactggaccagtatgaatcaggagcgaattgtggatgtcgcaggccctggaggatggaacgatccagacatgctggtgatcggcaattttggcctctcttgggaccagcaggttacccaaatggctctgtgggcaattatggccggtcctcttttcatgagcaacgatctgcgcgcgatctcaccacaggcaaaggccctgctccaagacaaagatgtgatagccatcaatcaggacccgttgggaaagcagggctaccagctgagaaaaggcgacaactttgaggtctgggaaaggcctttgagtggagatgcgtgggctgtggccattattaatcggcaagagatcggaggtccacgctcctatacaattcctgtagcatctcttggcaagggcgttgcctgtaacccagcttgcttcatcactcagcttctgccggtgaagagaaaactgggtttctacgaagctaccagcaggctccgatcccacatcaaccctacaggaaccgtcctcttgcagctggagaatacgatgcagacttcactgaaggacctcctg

SEQ ID NO: 1584 - protein, 398 aa, Artificial Sequence
  variant of human alpha-galactosidase A
LDNGLARTPPMGWLHWERFMCNLDCQEEPDSCISEKLFEEMAERMVTEGWKDAGYEYLCIDDCWMAPQRDSEGRLQADPQRFPHGIRQLANHVHSKGLKLGIYADVGNKTCAGFPGSFGYYDIDAQTFADWGVDLLKFDGCYCDSLENLADGYKHMSLALNRTGRPIVYSCEWPLYMWPFQKPNYTEIRQYCNHWRNFADIDDSWASIKSILDWTSMNQERIVDVAGPGGWNDPDMLVIGNFGLSWDQQVTQMALWAIMAGPLFMSNDLRAISPQAKALLQDKDVIAINQDPLGKQGYQLRKGDNFEVWERPLSGDAWAVAIINRQEIGGPRSYTIPVASLGKGVACNPACFITQLLPVKRKLGFYEATSRLRSHINPTGTVLLQLENTMQTSLKDLL

SEQ ID NO: 1585 - DNA, 1194 bp, Artificial Sequence
  variant of human alpha-galactosidase A
ctggataatggattggctagaacacctcctatggggtggcttcactgggagaggttcatgtgcaacctggactgtcaggaagaaccagacagctgcatctccgagaagctctttgaggaaatggccgaacgaatggtgactgagggctggaaagatgcaggttacgagtatctgtgtattgacgattgctggatggccccacaacgggattctgagggaagacttcaggctgatccgcagcgcttccctcatggcataaggcagctggcaaaccacgtccacagtaaggggctcaaattgggaatctacgcggacgtgggcaataagacctgtgccggttttccgggatcattcgggtattatgacattgacgcccaaacgtttgctgattggggcgttgacctgctgaaattcgatggttgctactgtgacagcctcgaaaacctggcagacggctacaagcatatgtctctcgccctgaatagaaccggtcggccaatcgtatattcctgcgagtggcctctttacatgtggccatttcagaaaccgaactacacagaaattcgccagtattgcaatcattggaggaacttcgctgatatcgatgactcatgggcctccataaagagcatcttggactggaccagtaataatcaggagcgaattgtggatgtcgcaggccctggaggatggaacgatccagacatgctggtgatcggcaattttggcctctcttgggaccagcaggttacccaaatggctctgtgggcaattatggccggtcctcttttcatgagcaacgatctgcgcgcgatctcaccacaggcaaaggccctgctccaagacaaagatgtgatagccatcaatcaggacccgttgggaaagcagggctaccagctgagaaaaggcgacaactttgaggtctgggaaaggcctttgagtggagatgcgtgggctgtggccattattaatcggcaagagatcggaggtccacgctcctatacaattcctgtagcatctcttggcaagggcgttgcctgtaacccagcttgcttcatcactcagcttctgccggtgaagagaaaactgggtttctacgaagctaccagcaggctccgatcccacatcaaccctacaggaaccgtcctcttgcagctggagaatacgatgcagacttcactgaaggacctcctg

SEQ ID NO: 1586 - protein, 398 aa, Artificial Sequence
  variant of human alpha-galactosidase A
LDNGLARTPPMGWLHWERFMCNLDCQEEPDSCISEKLFEEMAERMVTEGWKDAGYEYLCIDDCWMAPQRDSEGRLQADPQRFPHGIRQLANHVHSKGLKLGIYADVGNKTCAGFPGSFGYYDIDAQTFADWGVDLLKFDGCYCDSLENLADGYKHMSLALNRTGRPIVYSCEWPLYMWPFQKPNYTEIRQYCNHWRNFADIDDSWASIKSILDWTSNNQERIVDVAGPGGWNDPDMLVIGNFGLSWDQQVTQMALWAIMAGPLFMSNDLRAISPQAKALLQDKDVIAINQDPLGKQGYQLRKGDNFEVWERPLSGDAWAVAIINRQEIGGPRSYTIPVASLGKGVACNPACFITQLLPVKRKLGFYEATSRLRSHINPTGTVLLQLENTMQTSLKDLL

SEQ ID NO: 1587 - DNA, 1194 bp, Artificial Sequence
  variant of human alpha-galactosidase A
ctggataatggattggctagaacacctcctatggggtggcttcactgggagaggttcatgtgcaacctggactgtcaggaagaaccagacagctgcatctccgagaagctctttgaggaaatggccgaacgaatggtgactgagggctggaaagatgcaggttacgagtatctgtgtattgacgattgctggatggccccacaacgggattctgagggaagacttcaggctgatccgcagcgcttccctcatggcataaggcagctggcaaaccacgtccacagtaaggggctcaaattgggaatctacgcggacgtgggcaataagacctgtgccggttttccgggatcattcgggtattatgacattgacgcccaaacgtttgctgattggggcgttgacctgctgaaattcgatggttgctactgtgacagcctcgaaaacctggcagacggctacaagcatatgtctctcgccctgaatagaaccggtcggccaatcgtatattcctgcgagtggcctctttacatgtggccatttcagaaaccgaactacacagaaattcgccagtattgcaatcattggaggaacttcgctgatatcgatgactcatgggcctccataaagagcatcttggactggaccagtcctaatcaggagcgaattgtggatgtcgcaggccctggaggatggaacgatccagacatgctggtgatcggcaattttggcctctcttgggaccagcaggttacccaaatggctctgtgggcaattatggccggtcctcttttcatgagcaacgatctgcgcgcgatctcaccacaggcaaaggccctgctccaagacaaagatgtgatagccatcaatcaggacccgttgggaaagcagggctaccagctgagaaaaggcgacaactttgaggtctgggaaaggcctttgagtggagatgcgtgggctgtggccattattaatcggcaagagatcggaggtccacgctcctatacaattcctgtagcatctcttggcaagggcgttgcctgtaacccagcttgcttcatcactcagcttctgccggtgaagagaaaactgggtttctacgaagctaccagcaggctccgatcccacatcaaccctacaggaaccgtcctcttgcagctggagaatacgatgcagacttcactgaaggacctcctg

SEQ ID NO: 1588 - protein, 398 aa, Artificial Sequence
  variant of human alpha-galactosidase A
LDNGLARTPPMGWLHWERFMCNLDCQEEPDSCISEKLFEEMAERMVTEGWKDAGYEYLCIDDCWMAPQRDSEGRLQADPQRFPHGIRQLANHVHSKGLKLGIYADVGNKTCAGFPGSFGYYDIDAQTFADWGVDLLKFDGCYCDSLENLADGYKHMSLALNRTGRPIVYSCEWPLYMWPFQKPNYTEIRQYCNHWRNFADIDDSWASIKSILDWTSPNQERIVDVAGPGGWNDPDMLVIGNFGLSWDQQVTQMALWAIMAGPLFMSNDLRAISPQAKALLQDKDVIAINQDPLGKQGYQLRKGDNFEVWERPLSGDAWAVAIINRQEIGGPRSYTIPVASLGKGVACNPACFITQLLPVKRKLGFYEATSRLRSHINPTGTVLLQLENTMQTSLKDLL

SEQ ID NO: 1589 - DNA, 1194 bp, Artificial Sequence
  variant of human alpha-galactosidase A
ctggataatggattggctagaacacctcctatggggtggcttcactgggagaggttcatgtgcaacctggactgtcaggaagaaccagacagctgcatctccgagaagctctttgaggaaatggccgaacgaatggtgactgagggctggaaagatgcaggttacgagtatctgtgtattgacgattgctggatggccccacaacgggattctgagggaagacttcaggctgatccgcagcgcttccctcatggcataaggcagctggcaaaccacgtccacagtaaggggctcaaattgggaatctacgcggacgtgggcaataagacctgtgccggttttccgggatcattcgggtattatgacattgacgcccaaacgtttgctgattggggcgttgacctgctgaaattcgatggttgctactgtgacagcctcgaaaacctggcagacggctacaagcatatgtctctcgccctgaatagaaccggtcggccaatcgtatattcctgcgagtggcctctttacatgtggccatttcagaaaccgaactacacagaaattcgccagtattgcaatcattggaggaacttcgctgatatcgatgactcatgggcctccataaagagcatcttggactggaccagtcagaatcaggagcgaattgtggatgtcgcaggccctggaggatggaacgatccagacatgctggtgatcggcaattttggcctctcttgggaccagcaggttacccaaatggctctgtgggcaattatggccggtcctcttttcatgagcaacgatctgcgcgcgatctcaccacaggcaaaggccctgctccaagacaaagatgtgatagccatcaatcaggacccgttgggaaagcagggctaccagctgagaaaaggcgacaactttgaggtctgggaaaggcctttgagtggagatgcgtgggctgtggccattattaatcggcaagagatcggaggtccacgctcctatacaattcctgtagcatctcttggcaagggcgttgcctgtaacccagcttgcttcatcactcagcttctgccggtgaagagaaaactgggtttctacgaagctaccagcaggctccgatcccacatcaaccctacaggaaccgtcctcttgcagctggagaatacgatgcagacttcactgaaggacctcctg

SEQ ID NO: 1590 - protein, 398 aa, Artificial Sequence
  variant of human alpha-galactosidase A
LDNGLARTPPMGWLHWERFMCNLDCQEEPDSCISEKLFEEMAERMVTEGWKDAGYEYLCIDDCWMAPQRDSEGRLQADPQRFPHGIRQLANHVHSKGLKLGIYADVGNKTCAGFPGSFGYYDIDAQTFADWGVDLLKFDGCYCDSLENLADGYKHMSLALNRTGRPIVYSCEWPLYMWPFQKPNYTEIRQYCNHWRNFADIDDSWASIKSILDWTSQNQERIVDVAGPGGWNDPDMLVIGNFGLSWDQQVTQMALWAIMAGPLFMSNDLRAISPQAKALLQDKDVIAINQDPLGKQGYQLRKGDNFEVWERPLSGDAWAVAIINRQEIGGPRSYTIPVASLGKGVACNPACFITQLLPVKRKLGFYEATSRLRSHINPTGTVLLQLENTMQTSLKDLL

SEQ ID NO: 1591 - DNA, 1194 bp, Artificial Sequence
  variant of human alpha-galactosidase A
ctggataatggattggctagaacacctcctatggggtggcttcactgggagaggttcatgtgcaacctggactgtcaggaagaaccagacagctgcatctccgagaagctctttgaggaaatggccgaacgaatggtgactgagggctggaaagatgcaggttacgagtatctgtgtattgacgattgctggatggccccacaacgggattctgagggaagacttcaggctgatccgcagcgcttccctcatggcataaggcagctggcaaaccacgtccacagtaaggggctcaaattgggaatctacgcggacgtgggcaataagacctgtgccggttttccgggatcattcgggtattatgacattgacgcccaaacgtttgctgattggggcgttgacctgctgaaattcgatggttgctactgtgacagcctcgaaaacctggcagacggctacaagcatatgtctctcgccctgaatagaaccggtcggccaatcgtatattcctgcgagtggcctctttacatgtggccatttcagaaaccgaactacacagaaattcgccagtattgcaatcattggaggaacttcgctgatatcgatgactcatgggcctccataaagagcatcttggactggaccagtagtaatcaggagcgaattgtggatgtcgcaggccctggaggatggaacgatccagacatgctggtgatcggcaattttggcctctcttgggaccagcaggttacccaaatggctctgtgggcaattatggccggtcctcttttcatgagcaacgatctgcgcgcgatctcaccacaggcaaaggccctgctccaagacaaagatgtgatagccatcaatcaggacccgttgggaaagcagggctaccagctgagaaaaggcgacaactttgaggtctgggaaaggcctttgagtggagatgcgtgggctgtggccattattaatcggcaagagatcggaggtccacgctcctatacaattcctgtagcatctcttggcaagggcgttgcctgtaacccagcttgcttcatcactcagcttctgccggtgaagagaaaactgggtttctacgaagctaccagcaggctccgatcccacatcaaccctacaggaaccgtcctcttgcagctggagaatacgatgcagacttcactgaaggacctcctg

SEQ ID NO: 1592 - protein, 398 aa, Artificial Sequence
  variant of human alpha-galactosidase A
LDNGLARTPPMGWLHWERFMCNLDCQEEPDSCISEKLFEEMAERMVTEGWKDAGYEYLCIDDCWMAPQRDSEGRLQADPQRFPHGIRQLANHVHSKGLKLGIYADVGNKTCAGFPGSFGYYDIDAQTFADWGVDLLKFDGCYCDSLENLADGYKHMSLALNRTGRPIVYSCEWPLYMWPFQKPNYTEIRQYCNHWRNFADIDDSWASIKSILDWTSSNQERIVDVAGPGGWNDPDMLVIGNFGLSWDQQVTQMALWAIMAGPLFMSNDLRAISPQAKALLQDKDVIAINQDPLGKQGYQLRKGDNFEVWERPLSGDAWAVAIINRQEIGGPRSYTIPVASLGKGVACNPACFITQLLPVKRKLGFYEATSRLRSHINPTGTVLLQLENTMQTSLKDLL

SEQ ID NO: 1593 - DNA, 1194 bp, Artificial Sequence
  variant of human alpha-galactosidase A
ctggataatggattggctagaacacctcctatggggtggcttcactgggagaggttcatgtgcaacctggactgtcaggaagaaccagacagctgcatctccgagaagctctttgaggaaatggccgaacgaatggtgactgagggctggaaagatgcaggttacgagtatctgtgtattgacgattgctggatggccccacaacgggattctgagggaagacttcaggctgatccgcagcgcttccctcatggcataaggcagctggcaaaccacgtccacagtaaggggctcaaattgggaatctacgcggacgtgggcaataagacctgtgccggttttccgggatcattcgggtattatgacattgacgcccaaacgtttgctgattggggcgttgacctgctgaaattcgatggttgctactgtgacagcctcgaaaacctggcagacggctacaagcatatgtctctcgccctgaatagaaccggtcggccaatcgtatattcctgcgagtggcctctttacatgtggccatttcagaaaccgaactacacagaaattcgccagtattgcaatcattggaggaacttcgctgatatcgatgactcatgggcctccataaagagcatcttggactggaccagtactaatcaggagcgaattgtggatgtcgcaggccctggaggatggaacgatccagacatgctggtgatcggcaattttggcctctcttgggaccagcaggttacccaaatggctctgtgggcaattatggccggtcctcttttcatgagcaacgatctgcgcgcgatctcaccacaggcaaaggccctgctccaagacaaagatgtgatagccatcaatcaggacccgttgggaaagcagggctaccagctgagaaaaggcgacaactttgaggtctgggaaaggcctttgagtggagatgcgtgggctgtggccattattaatcggcaagagatcggaggtccacgctcctatacaattcctgtagcatctcttggcaagggcgttgcctgtaacccagcttgcttcatcactcagcttctgccggtgaagagaaaactgggtttctacgaagctaccagcaggctccgatcccacatcaaccctacaggaaccgtcctcttgcagctggagaatacgatgcagacttcactgaaggacctcctg

SEQ ID NO: 1594 - protein, 398 aa, Artificial Sequence
  variant of human alpha-galactosidase A
LDNGLARTPPMGWLHWERFMCNLDCQEEPDSCISEKLFEEMAERMVTEGWKDAGYEYLCIDDCWMAPQRDSEGRLQADPQRFPHGIRQLANHVHSKGLKLGIYADVGNKTCAGFPGSFGYYDIDAQTFADWGVDLLKFDGCYCDSLENLADGYKHMSLALNRTGRPIVYSCEWPLYMWPFQKPNYTEIRQYCNHWRNFADIDDSWASIKSILDWTSTNQERIVDVAGPGGWNDPDMLVIGNFGLSWDQQVTQMALWAIMAGPLFMSNDLRAISPQAKALLQDKDVIAINQDPLGKQGYQLRKGDNFEVWERPLSGDAWAVAIINRQEIGGPRSYTIPVASLGKGVACNPACFITQLLPVKRKLGFYEATSRLRSHINPTGTVLLQLENTMQTSLKDLL

SEQ ID NO: 1595 - DNA, 1194 bp, Artificial Sequence
  variant of human alpha-galactosidase A
ctggataatggattggctagaacacctcctatggggtggcttcactgggagaggttcatgtgcaacctggactgtcaggaagaaccagacagctgcatctccgagaagctctttgaggaaatggccgaacgaatggtgactgagggctggaaagatgcaggttacgagtatctgtgtattgacgattgctggatggccccacaacgggattctgagggaagacttcaggctgatccgcagcgcttccctcatggcataaggcagctggcaaaccacgtccacagtaaggggctcaaattgggaatctacgcggacgtgggcaataagacctgtgccggttttccgggatcattcgggtattatgacattgacgcccaaacgtttgctgattggggcgttgacctgctgaaattcgatggttgctactgtgacagcctcgaaaacctggcagacggctacaagcatatgtctctcgccctgaatagaaccggtcggccaatcgtatattcctgcgagtggcctctttacatgtggccatttcagaaaccgaactacacagaaattcgccagtattgcaatcattggaggaacttcgctgatatcgatgactcatgggcctccataaagagcatcttggactggaccagtgttaatcaggagcgaattgtggatgtcgcaggccctggaggatggaacgatccagacatgctggtgatcggcaattttggcctctcttgggaccagcaggttacccaaatggctctgtgggcaattatggccggtcctcttttcatgagcaacgatctgcgcgcgatctcaccacaggcaaaggccctgctccaagacaaagatgtgatagccatcaatcaggacccgttgggaaagcagggctaccagctgagaaaaggcgacaactttgaggtctgggaaaggcctttgagtggagatgcgtgggctgtggccattattaatcggcaagagatcggaggtccacgctcctatacaattcctgtagcatctcttggcaagggcgttgcctgtaacccagcttgcttcatcactcagcttctgccggtgaagagaaaactgggtttctacgaagctaccagcaggctccgatcccacatcaaccctacaggaaccgtcctcttgcagctggagaatacgatgcagacttcactgaaggacctcctg

SEQ ID NO: 1596 - protein, 398 aa, Artificial Sequence
  variant of human alpha-galactosidase A
LDNGLARTPPMGWLHWERFMCNLDCQEEPDSCISEKLFEEMAERMVTEGWKDAGYEYLCIDDCWMAPQRDSEGRLQADPQRFPHGIRQLANHVHSKGLKLGIYADVGNKTCAGFPGSFGYYDIDAQTFADWGVDLLKFDGCYCDSLENLADGYKHMSLALNRTGRPIVYSCEWPLYMWPFQKPNYTEIRQYCNHWRNFADIDDSWASIKSILDWTSVNQERIVDVAGPGGWNDPDMLVIGNFGLSWDQQVTQMALWAIMAGPLFMSNDLRAISPQAKALLQDKDVIAINQDPLGKQGYQLRKGDNFEVWERPLSGDAWAVAIINRQEIGGPRSYTIPVASLGKGVACNPACFITQLLPVKRKLGFYEATSRLRSHINPTGTVLLQLENTMQTSLKDLL

SEQ ID NO: 1597 - DNA, 1194 bp, Artificial Sequence
  variant of human alpha-galactosidase A
ctggataatggattggctagaacacctcctatggggtggcttcactgggagaggttcatgtgcaacctggactgtcaggaagaaccagacagctgcatctccgagaagctctttgaggaaatggccgaacgaatggtgactgagggctggaaagatgcaggttacgagtatctgtgtattgacgattgctggatggccccacaacgggattctgagggaagacttcaggctgatccgcagcgcttccctcatggcataaggcagctggcaaaccacgtccacagtaaggggctcaaattgggaatctacgcggacgtgggcaataagacctgtgccggttttccgggatcattcgggtattatgacattgacgcccaaacgtttgctgattggggcgttgacctgctgaaattcgatggttgctactgtgacagcctcgaaaacctggcagacggctacaagcatatgtctctcgccctgaatagaaccggtcggccaatcgtatattcctgcgagtggcctctttacatgtggccatttcagaaaccgaactacacagaaattcgccagtattgcaatcattggaggaacttcgctgatatcgatgactcatgggcctccataaagagcatcttggactggaccagttggaatcaggagcgaattgtggatgtcgcaggccctggaggatggaacgatccagacatgctggtgatcggcaattttggcctctcttgggaccagcaggttacccaaatggctctgtgggcaattatggccggtcctcttttcatgagcaacgatctgcgcgcgatctcaccacaggcaaaggccctgctccaagacaaagatgtgatagccatcaatcaggacccgttgggaaagcagggctaccagctgagaaaaggcgacaactttgaggtctgggaaaggcctttgagtggagatgcgtgggctgtggccattattaatcggcaagagatcggaggtccacgctcctatacaattcctgtagcatctcttggcaagggcgttgcctgtaacccagcttgcttcatcactcagcttctgccggtgaagagaaaactgggtttctacgaagctaccagcaggctccgatcccacatcaaccctacaggaaccgtcctcttgcagctggagaatacgatgcagacttcactgaaggacctcctg

SEQ ID NO: 1598 - protein, 398 aa, Artificial Sequence
  variant of human alpha-galactosidase A
LDNGLARTPPMGWLHWERFMCNLDCQEEPDSCISEKLFEEMAERMVTEGWKDAGYEYLCIDDCWMAPQRDSEGRLQADPQRFPHGIRQLANHVHSKGLKLGIYADVGNKTCAGFPGSFGYYDIDAQTFADWGVDLLKFDGCYCDSLENLADGYKHMSLALNRTGRPIVYSCEWPLYMWPFQKPNYTEIRQYCNHWRNFADIDDSWASIKSILDWTSWNQERIVDVAGPGGWNDPDMLVIGNFGLSWDQQVTQMALWAIMAGPLFMSNDLRAISPQAKALLQDKDVIAINQDPLGKQGYQLRKGDNFEVWERPLSGDAWAVAIINRQEIGGPRSYTIPVASLGKGVACNPACFITQLLPVKRKLGFYEATSRLRSHINPTGTVLLQLENTMQTSLKDLL

SEQ ID NO: 1599 - DNA, 1194 bp, Artificial Sequence
  variant of human alpha-galactosidase A
ctggataatggattggctagaacacctcctatggggtggcttcactgggagaggttcatgtgcaacctggactgtcaggaagaaccagacagctgcatctccgagaagctctttgaggaaatggccgaacgaatggtgactgagggctggaaagatgcaggttacgagtatctgtgtattgacgattgctggatggccccacaacgggattctgagggaagacttcaggctgatccgcagcgcttccctcatggcataaggcagctggcaaaccacgtccacagtaaggggctcaaattgggaatctacgcggacgtgggcaataagacctgtgccggttttccgggatcattcgggtattatgacattgacgcccaaacgtttgctgattggggcgttgacctgctgaaattcgatggttgctactgtgacagcctagaaaacctggcagacggctacaagcatatgtctctcgccctgaatagaaccggtcggccaatcgtatattcctgcgagtggcctctttacatgtggccatttcagaaaccgaactacacagaaattcgccagtattgcaatcattggaggaacttcgctgatatcgatgactcatgggcctccataaagagcatcttggactggaccagttacaatcaggagcgaattgtggatgtcgcaggccctggaggatggaacgatccagacatgctggtgatcggcaattttggcctctcttgggaccagcaggttacccaaatggctctgtgggcaattatggccggtcctcttttcatgagcaacgatctgcgcgcgatctcaccacaggcaaaggccctgctccaagacaaagatgtgatagccatcaatcaggacccgttgggaaagcagggctaccagctgagaaaaggcgacaactttgaggtctgggaaaggcctttgagtggagatgcgtgggctgtggccattattaatcggcaagagatcggaggtccacgctcctatacaattcctgtagcatctcttggcaagggcgttgcctgtaacccagcttgcttcatcactcagcttctgccggtgaagagaaaactgggtttctacgaagctaccagcaggctccgatcccacatcaaccctacaggaaccgtcctcttgcagctggagaatacgatgcagacttcactgaaggacctcctg

SEQ ID NO: 1600 - protein, 398 aa, Artificial Sequence
  variant of human alpha-galactosidase A
LDNGLARTPPMGWLHWERFMCNLDCQEEPDSCISEKLFEEMAERMVTEGWKDAGYEYLCIDDCWMAPQRDSEGRLQADPQRFPHGIRQLANHVHSKGLKLGIYADVGNKTCAGFPGSFGYYDIDAQTFADWGVDLLKFDGCYCDSLENLADGYKHMSLALNRTGRPIVYSCEWPLYMWPFQKPNYTEIRQYCNHWRNFADIDDSWASIKSILDWTSYNQERIVDVAGPGGWNDPDMLVIGNFGLSWDQQVTQMALWAIMAGPLFMSNDLRAISPQAKALLQDKDVIAINQDPLGKQGYQLRKGDNFEVWERPLSGDAWAVAIINRQEIGGPRSYTIPVASLGKGVACNPACFITQLLPVKRKLGFYEATSRLRSHINPTGTVLLQLENTMQTSLKDLL

SEQ ID NO: 1601 - DNA, 1194 bp, Artificial Sequence
  variant of human alpha-galactosidase A
ctggataatggattggctagaacacctcctatggggtggcttcactgggagaggttcatgtgcaacctggactgtcaggaagaaccagacagctgcatctccgagaagctctttgaggaaatggccgaagctatggtgactgagggctggaaagatgcaggttacgagtatctgtgtattgacgattgctggatggccccacaacgggattctgagggaagacttcaggctgatccgcagcgcttccctcatggcataaggcagctggcaaaccacgtccacagtaaggggctcaaattgggaatctacgcggacgtgggcaataagacctgtgccggttttccgggatcattcgggtattatgacattgacgcccaaacgtttgctgattggggcgttgacctgctgaaattcgatggttgctactgtgacagcctcgaaaacctggcagacggctacaagcatatgtctctcgccctgaatagaaccggtcggccaatcgtatattcctgcgagtggcctctttacatgtggccatttcagaaaccgaactacacagaaattcgccagtattgcaatcattggaggaacttcgctgatatcgatgactcatgggcctccataaagagcatcttggactggaccagtcggaatcaggagcgaattgtggatgtcgcaggccctggaggatggaacgatccagacatgctggtgatcggcaattttggcctctcttgggaccagcaggttacccaaatggctctgtgggcaattatggccggtcctcttttcatgagcaacgatctgcgcgcgatctcaccacaggcaaaggccctgctccaagacaaagatgtgatagccatcaatcaggacccgttgggaaagcagggctaccagctgagaaaaggcgacaactttgaggtctgggaaaggcctttgagtggagatgcgtgggctgtggccattattaatcggcaagagatcggaggtccacgctcctatacaattcctgtagcatctcttggcaagggcgttgcctgtaacccagcttgcttcatcactcagcttctgccggtgaagagaaaactgggtttctacgaagctaccagcaggctccgatcccacatcaaccctacaggaaccgtcctcttgcagctggagaatacgatgcagacttcactgaaggacctcctg

SEQ ID NO: 1602 - protein, 398 aa, Artificial Sequence
  variant of human alpha-galactosidase A
LDNGLARTPPMGWLHWERFMCNLDCQEEPDSCISEKLFEEMAEAMVTEGWKDAGYEYLCIDDCWMAPQRDSEGRLQADPQRFPHGIRQLANHVHSKGLKLGIYADVGNKTCAGFPGSFGYYDIDAQTFADWGVDLLKFDGCYCDSLENLADGYKHMSLALNRTGRPIVYSCEWPLYMWPFQKPNYTEIRQYCNHWRNFADIDDSWASIKSILDWTSRNQERIVDVAGPGGWNDPDMLVIGNFGLSWDQQVTQMALWAIMAGPLFMSNDLRAISPQAKALLQDKDVIAINQDPLGKQGYQLRKGDNFEVWERPLSGDAWAVAIINRQEIGGPRSYTIPVASLGKGVACNPACFITQLLPVKRKLGFYEATSRLRSHINPTGTVLLQLENTMQTSLKDLL

SEQ ID NO: 1603 - DNA, 1194 bp, Artificial Sequence
  variant of human alpha-galactosidase A
ctggataatggattggctagaacacctcctatggggtggcttcactgggagaggttcatgtgcaacctggactgtcaggaagaaccagacagctgcatctccgagaagctctttgaggaaatggccgaatgtatggtgactgagggctggaaagatgcaggttacgagtatctgtgtattgacgattgctggatggccccacaacgggattctgagggaagacttcaggctgatccgcagcgcttccctcatggcataaggcagctggcaaaccacgtccacagtaaggggctcaaattgggaatctacgcggacgtgggcaataagacctgtgccggttttccgggatcattcgggtattatgacattgacgcccaaacgtttgctgattggggcgttgacctgctgaaattcgatggttgctactgtgacagcctcgaaaacctggcagacggctacaagcatatgtctctcgccctgaatagaaccggtcggccaatcgtatattcctgcgagtggcctctttacatgtggccatttcagaaaccgaactacacagaaattcgccagtattgcaatcattggaggaacttcgctgatatcgatgactcatgggcctccataaagagcatcttggactggaccagtcggaatcaggagcgaattgtggatgtcgcaggccctggaggatggaacgatccagacatgctggtgatcggcaattttggcctctcttgggaccagcaggttacccaaatggctctgtgggcaattatggccggtcctcttttcatgagcaacgatctgcgcgcgatctcaccacaggcaaaggccctgctccaagacaaagatgtgatagccatcaatcaggacccgttgggaaagcagggctaccagctgagaaaaggcgacaactttgaggtctgggaaaggcctttgagtggagatgcgtgggctgtggccattattaatcggcaagagatcggaggtccacgctcctatacaattcctgtagcatctcttggcaagggcgttgcctgtaacccagcttgcttcatcactcagcttctgccggtgaagagaaaactgggtttctacgaagctaccagcaggctccgatcccacatcaaccctacaggaaccgtcctcttgcagctggagaatacgatgcagacttcactgaaggacctcctg

SEQ ID NO: 1604 - protein, 398 aa, Artificial Sequence
  variant of human alpha-galactosidase A
LDNGLARTPPMGWLHWERFMCNLDCQEEPDSCISEKLFEEMAECMVTEGWKDAGYEYLCIDDCWMAPQRDSEGRLQADPQRFPHGIRQLANHVHSKGLKLGIYADVGNKTCAGFPGSFGYYDIDAQTFADWGVDLLKFDGCYCDSLENLADGYKHMSLALNRTGRPIVYSCEWPLYMWPFQKPNYTEIRQYCNHWRNFADIDDSWASIKSILDWTSRNQERIVDVAGPGGWNDPDMLVIGNFGLSWDQQVTQMALWAIMAGPLFMSNDLRAISPQAKALLQDKDVIAINQDPLGKQGYQLRKGDNFEVWERPLSGDAWAVAIINRQEIGGPRSYTIPVASLGKGVACNPACFITQLLPVKRKLGFYEATSRLRSHINPTGTVLLQLENTMQTSLKDLL

SEQ ID NO: 1605 - DNA, 1194 bp, Artificial Sequence
  variant of human alpha-galactosidase A
ctggataatggattggctagaacacctcctatggggtggcttcactgggagaggttcatgtgcaacctggactgtcaggaagaaccagacagctgcatctccgagaagctctttgaggaaatggccgaagatatggtgactgagggctggaaagatgcaggttacgagtatctgtgtattgacgattgctggatggccccacaacgggattctgagggaagacttcaggctgatccgcagcgcttccctcatggcataaggcagctggcaaaccacgtccacagtaaggggctcaaattgggaatctacgcggacgtgggcaataagacctgtgccggttttccgggatcattcgggtattatgacattgacgcccaaacgtttgctgattggggcgttgacctgctgaaattcgatggttgctactgtgacagcctcgaaaacctggcagacggctacaagcatatgtctctcgccctgaatagaaccggtcggccaatcgtatattcctgcgagtggcctctttacatgtggccatttcagaaaccgaactacacagaaattcgccagtattgcaatcattggaggaacttcgctgatatcgatgactcatgggcctccataaagagcatcttggactggaccagtcggaatcaggagcgaattgtggatgtcgcaggccctggaggatggaacgatccagacatgctggtgatcggcaattttggcctctcttgggaccagcaggttacccaaatggctctgtgggcaattatggccggtcctcttttcatgagcaacgatctgcgcgcgatctcaccacaggcaaaggccctgctccaagacaaagatgtgatagccatcaatcaggacccgttgggaaagcagggctaccagctgagaaaaggcgacaactttgaggtctgggaaaggcctttgagtggagatgcgtgggctgtggccattattaatcggcaagagatcggaggtccacgctcctatacaattcctgtagcatctcttggcaagggcgttgcctgtaacccagcttgcttcatcactcagcttctgccggtgaagagaaaactgggtttctacgaagctaccagcaggctccgatcccacatcaaccctacaggaaccgtcctcttgcagctggagaatacgatgcagacttcactgaaggacctcctg

SEQ ID NO: 1606 - protein, 398 aa, Artificial Sequence
  variant of human alpha-galactosidase A
LDNGLARTPPMGWLHWERFMCNLDCQEEPDSCISEKLFEEMAEDMVTEGWKDAGYEYLCIDDCWMAPQRDSEGRLQADPQRFPHGIRQLANHVHSKGLKLGIYADVGNKTCAGFPGSFGYYDIDAQTFADWGVDLLKFDGCYCDSLENLADGYKHMSLALNRTGRPIVYSCEWPLYMWPFQKPNYTEIRQYCNHWRNFADIDDSWASIKSILDWTSRNQERIVDVAGPGGWNDPDMLVIGNFGLSWDQQVTQMALWAIMAGPLFMSNDLRAISPQAKALLQDKDVIAINQDPLGKQGYQLRKGDNFEVWERPLSGDAWAVAIINRQEIGGPRSYTIPVASLGKGVACNPACFITQLLPVKRKLGFYEATSRLRSHINPTGTVLLQLENTMQTSLKDLL

SEQ ID NO: 1607 - DNA, 1194 bp, Artificial Sequence
  variant of human alpha-galactosidase A
ctggataatggattggctagaacacctcctatggggtggcttcactgggagaggttcatgtgcaacctggactgtcaggaagaaccagacagctgcatctccgagaagctctttgaggaaatggccgaagagatggtgactgagggctggaaagatgcaggttacgagtatctgtgtattgacgattgctggatggccccacaacgggattctgagggaagacttcaggctgatccgcagcgcttccctcatggcataaggcagctggcaaaccacgtccacagtaaggggctcaaattgggaatctacgcggacgtgggcaataagacctgtgccggttttccgggatcattcgggtattatgacattgacgcccaaacgtttgctgattggggcgttgacctgctgaaattcgatggttgctactgtgacagcctcgaaaacctggcagacggctacaagcatatgtctctcgccctgaatagaaccggtcggccaatcgtatattcctgcgagtggcctctttacatgtggccatttcagaaaccgaactacacagaaattcgccagtattgcaatcattggaggaacttcgctgatatcgatgactcatgggcctccataaagagcatcttggactggaccagtcggaatcaggagcgaattgtggatgtcgcaggccctggaggatggaacgatccagacatgctggtgatcggcaattttggcctctcttgggaccagcaggttacccaaatggctctgtgggcaattatggccggtcctcttttcatgagcaacgatctgcgcgcgatctcaccacaggcaaaggccctgctccaagacaaagatgtgatagccatcaatcaggacccgttgggaaagcagggctaccagctgagaaaaggcgacaactttgaggtctgggaaaggcctttgagtggagatgcgtgggctgtggccattattaatcggcaagagatcggaggtccacgctcctatacaattcctgtagcatctcttggcaagggcgttgcctgtaacccagcttgcttcatcactcagcttctgccggtgaagagaaaactgggtttctacgaagctaccagcaggctccgatcccacatcaaccctacaggaaccgtcctcttgcagctggagaatacgatgcagacttcactgaaggacctcctg

SEQ ID NO: 1608 - protein, 398 aa, Artificial Sequence
  variant of human alpha-galactosidase A
LDNGLARTPPMGWLHWERFMCNLDCQEEPDSCISEKLFEEMAEEMVTEGWKDAGYEYLCIDDCWMAPQRDSEGRLQADPQRFPHGIRQLANHVHSKGLKLGIYADVGNKTCAGFPGSFGYYDIDAQTFADWGVDLLKFDGCYCDSLENLADGYKHMSLALNRTGRPIVYSCEWPLYMWPFQKPNYTEIRQYCNHWRNFADIDDSWASIKSILDWTSRNQERIVDVAGPGGWNDPDMLVIGNFGLSWDQQVTQMALWAIMAGPLFMSNDLRAISPQAKALLQDKDVIAINQDPLGKQGYQLRKGDNFEVWERPLSGDAWAVAIINRQEIGGPRSYTIPVASLGKGVACNPACFITQLLPVKRKLGFYEATSRLRSHINPTGTVLLQLENTMQTSLKDLL

SEQ ID NO: 1609 - DNA, 1194 bp, Artificial Sequence
  variant of human alpha-galactosidase A
ctggataatggattggctagaacacctcctatggggtggcttcactgggagaggttcatgtgcaacctggactgtcaggaagaaccagacagctgcatctccgagaagctctttgaggaaatggccgaatttatggtgactgagggctggaaagatgcaggttacgagtatctgtgtattgacgattgctggatggccccacaacgggattctgagggaagacttcaggctgatccgcagcgcttccctcatggcataaggcagctggcaaaccacgtccacagtaaggggctcaaattgggaatctacgcggacgtgggcaataagacctgtgccggttttccgggatcattcgggtattatgacattgacgcccaaacgtttgctgattggggcgttgacctgctgaaattcgatggttgctactgtgacagcctcgaaaacctggcagacggctacaagcatatgtctctcgccctgaatagaaccggtcggccaatcgtatattcctgcgagtggcctctttacatgtggccatttcagaaaccgaactacacagaaattcgccagtattgcaatcattggaggaacttcgctgatatcgatgactcatgggcctccataaagagcatcttggactggaccagtcggaatcaggagcgaattgtggatgtcgcaggccctggaggatggaacgatccagacatgctggtgatcggcaattttggcctctcttgggaccagcaggttacccaaatggctctgtgggcaattatggccggtcctcttttcatgagcaacgatctgcgcgcgatctcaccacaggcaaaggccctgctccaagacaaagatgtgatagccatcaatcaggacccgttgggaaagcagggctaccagctgagaaaaggcgacaactttgaggtctgggaaaggcctttgagtggagatgcgtgggctgtggccattattaatcggcaagagatcggaggtccacgctcctatacaattcctgtagcatctcttggcaagggcgttgcctgtaacccagcttgcttcatcactcagcttctgccggtgaagagaaaactgggtttctacgaagctaccagcaggctccgatcccacatcaaccctacaggaaccgtcctcttgcagctggagaatacgatgcagacttcactgaaggacctcctg

SEQ ID NO: 1610 - protein, 398 aa, Artificial Sequence
  variant of human alpha-galactosidase A
LDNGLARTPPMGWLHWERFMCNLDCQEEPDSCISEKLFEEMAEFMVTEGWKDAGYEYLCIDDCWMAPQRDSEGRLQADPQRFPHGIRQLANHVHSKGLKLGIYADVGNKTCAGFPGSFGYYDIDAQTFADWGVDLLKFDGCYCDSLENLADGYKHMSLALNRTGRPIVYSCEWPLYMWPFQKPNYTEIRQYCNHWRNFADIDDSWASIKSILDWTSRNQERIVDVAGPGGWNDPDMLVIGNFGLSWDQQVTQMALWAIMAGPLFMSNDLRAISPQAKALLQDKDVIAINQDPLGKQGYQLRKGDNFEVWERPLSGDAWAVAIINRQEIGGPRSYTIPVASLGKGVACNPACFITQLLPVKRKLGFYEATSRLRSHINPTGTVLLQLENTMQTSLKDLL

SEQ ID NO: 1611 - DNA, 1194 bp, Artificial Sequence
  variant of human alpha-galactosidase A
ctggataatggattggctagaacacctcctatggggtggcttcactgggagaggttcatgtgcaacctggactgtcaggaagaaccagacagctgcatctccgagaagctctttgaggaaatggccgaaggtatggtgactgagggctggaaagatgcaggttacgagtatctgtgtattgacgattgctggatggccccacaacgggattctgagggaagacttcaggctgatccgcagcgcttccctcatggcataaggcagctggcaaaccacgtccacagtaaggggctcaaattgggaatctacgcggacgtgggcaataagacctgtgccggttttccgggatcattcgggtattatgacattgacgcccaaacgtttgctgattggggcgttgacctgctgaaattcgatggttgctactgtgacagcctcgaaaacctggcagacggctacaagcatatgtctctcgccctgaatagaaccggtcggccaatcgtatattcctgcgagtggcctctttacatgtggccatttcagaaaccgaactacacagaaattcgccagtattgcaatcattggaggaacttcgctgatatcgatgactcatgggcctccataaagagcatcttggactggaccagtcggaatcaggagcgaattgtggatgtcgcaggccctggaggatggaacgatccagacatgctggtgatcggcaattttggcctctcttgggaccagcaggttacccaaatggctctgtgggcaattatggccggtcctcttttcatgagcaacgatctgcgcgcgatctcaccacaggcaaaggccctgctccaagacaaagatgtgatagccatcaatcaggacccgttgggaaagcagggctaccagctgagaaaaggcgacaactttgaggtctgggaaaggcctttgagtggagatgcgtgggctgtggccattattaatcggcaagagatcggaggtccacgctcctatacaattcctgtagcatctcttggcaagggcgttgcctgtaacccagcttgcttcatcactcagcttctgccggtgaagagaaaactgggtttctacgaagctaccagcaggctccgatcccacatcaaccctacaggaaccgtcctcttgcagctggagaatacgatgcagacttcactgaaggacctcctg

SEQ ID NO: 1612 - protein, 398 aa, Artificial Sequence
  variant of human alpha-galactosidase A
LDNGLARTPPMGWLHWERFMCNLDCQEEPDSCISEKLFEEMAEGMVTEGWKDAGYEYLCIDDCWMAPQRDSEGRLQADPQRFPHGIRQLANHVHSKGLKLGIYADVGNKTCAGFPGSFGYYDIDAQTFADWGVDLLKFDGCYCDSLENLADGYKHMSLALNRTGRPIVYSCEWPLYMWPFQKPNYTEIRQYCNHWRNFADIDDSWASIKSILDWTSRNQERIVDVAGPGGWNDPDMLVIGNFGLSWDQQVTQMALWAIMAGPLFMSNDLRAISPQAKALLQDKDVIAINQDPLGKQGYQLRKGDNFEVWERPLSGDAWAVAIINRQEIGGPRSYTIPVASLGKGVACNPACFITQLLPVKRKLGFYEATSRLRSHINPTGTVLLQLENTMQTSLKDLL

SEQ ID NO: 1613 - DNA, 1194 bp, Artificial Sequence
  variant of human alpha-galactosidase A
ctggataatggattggctagaacacctcctatggggtggcttcactgggagaggttcatgtgcaacctggactgtcaggaagaaccagacagctgcatctccgagaagctctttgaggaaatggccgaacatatggtgactgagggctggaaagatgcaggttacgagtatctgtgtattgacgattgctggatggccccacaacgggattctgagggaagacttcaggctgatccgcagcgcttccctcatggcataaggcagctggcaaaccacgtccacagtaaggggctcaaattgggaatctacgcggacgtgggcaataagacctgtgccggttttccgggatcattcgggtattatgacattgacgcccaaacgtttgctgattggggcgttgacctgctgaaattcgatggttgctactgtgacagcctcgaaaacctggcagacggctacaagcatatgtctctcgccctgaatagaaccggtcggccaatcgtatattcctgcgagtggcctctttacatgtggccatttcagaaaccgaactacacagaaattcgccagtattgcaatcattggaggaacttcgctgatatcgatgactcatgggcctccataaagagcatcttggactggaccagtcggaatcaggagcgaattgtggatgtcgcaggccctggaggatggaacgatccagacatgctggtgatcggcaattttggcctctcttgggaccagcaggttacccaaatggctctgtgggcaattatggccggtcctcttttcatgagcaacgatctgcgcgcgatctcaccacaggcaaaggccctgctccaagacaaagatgtgatagccatcaatcaggacccgttgggaaagcagggctaccagctgagaaaaggcgacaactttgaggtctgggaaaggcctttgagtggagatgcgtgggctgtggccattattaatcggcaagagatcggaggtccacgctcctatacaattcctgtagcatctcttggcaagggcgttgcctgtaacccagcttgcttcatcactcagcttctgccggtgaagagaaaactgggtttctacgaagctaccagcaggctccgatcccacatcaaccctacaggaaccgtcctcttgcagctggagaatacgatgcagacttcactgaaggacctcctg

SEQ ID NO: 1614 - protein, 398 aa, Artificial Sequence
  variant of human alpha-galactosidase A
LDNGLARTPPMGWLHWERFMCNLDCQEEPDSCISEKLFEEMAEHMVTEGWKDAGYEYLCIDDCWMAPQRDSEGRLQADPQRFPHGIRQLANHVHSKGLKLGIYADVGNKTCAGFPGSFGYYDIDAQTFADWGVDLLKFDGCYCDSLENLADGYKHMSLALNRTGRPIVYSCEWPLYMWPFQKPNYTEIRQYCNHWRNFADIDDSWASIKSILDWTSRNQERIVDVAGPGGWNDPDMLVIGNFGLSWDQQVTQMALWAIMAGPLFMSNDLRAISPQAKALLQDKDVIAINQDPLGKQGYQLRKGDNFEVWERPLSGDAWAVAIINRQEIGGPRSYTIPVASLGKGVACNPACFITQLLPVKRKLGFYEATSRLRSHINPTGTVLLQLENTMQTSLKDLL

SEQ ID NO: 1615 - DNA, 1194 bp, Artificial Sequence
  variant of human alpha-galactosidase A
ctggataatggattggctagaacacctcctatggggtggcttcactgggagaggttcatgtgcaacctggactgtcaggaagaaccagacagctgcatctccgagaagctctttgaggaaatggccgaaattatggtgactgagggctggaaagatgcaggttacgagtatctgtgtattgacgattgctggatggccccacaacgggattctgagggaagacttcaggctgatccgcagcgcttccctcatggcataaggcagctggcaaaccacgtccacagtaaggggctcaaattgggaatctacgcggacgtgggcaataagacctgtgccggttttccgggatcattcgggtattatgacattgacgcccaaacgtttgctgattggggcgttgacctgctgaaattcgatggttgctactgtgacagcctcgaaaacctggcagacggctacaagcatatgtctctcgccctgaatagaaccggtcggccaatcgtatattcctgcgagtggcctctttacatgtggccatttcagaaaccgaactacacagaaattcgccagtattgcaatcattggaggaacttcgctgatatcgatgactcatgggcctccataaagagcatcttggactggaccagtcggaatcaggagcgaattgtggatgtcgcaggccctggaggatggaacgatccagacatgctggtgatcggcaattttggcctctcttgggaccagcaggttacccaaatggctctgtgggcaattatggccggtcctcttttcatgagcaacgatctgcgcgcgatctcaccacaggcaaaggccctgctccaagacaaagatgtgatagccatcaatcaggacccgttgggaaagcagggctaccagctgagaaaaggcgacaactttgaggtctgggaaaggcctttgagtggagatgcgtgggctgtggccattattaatcggcaagagatcggaggtccacgctcctatacaattcctgtagcatctcttggcaagggcgttgcctgtaacccagcttgcttcatcactcagcttctgccggtgaagagaaaactgggtttctacgaagctaccagcaggctccgatcccacatcaaccctacaggaaccgtcctcttgcagctggagaatacgatgcagacttcactgaaggacctcctg

SEQ ID NO: 1616 - protein, 398 aa, Artificial Sequence
  variant of human alpha-galactosidase A
LDNGLARTPPMGWLHWERFMCNLDCQEEPDSCISEKLFEEMAEIMVTEGWKDAGYEYLCIDDCWMAPQRDSEGRLQADPQRFPHGIRQLANHVHSKGLKLGIYADVGNKTCAGFPGSFGYYDIDAQTFADWGVDLLKFDGCYCDSLENLADGYKHMSLALNRTGRPIVYSCEWPLYMWPFQKPNYTEIRQYCNHWRNFADIDDSWASIKSILDWTSRNQERIVDVAGPGGWNDPDMLVIGNFGLSWDQQVTQMALWAIMAGPLFMSNDLRAISPQAKALLQDKDVIAINQDPLGKQGYQLRKGDNFEVWERPLSGDAWAVAIINRQEIGGPRSYTIPVASLGKGVACNPACFITQLLPVKRKLGFYEATSRLRSHINPTGTVLLQLENTMQTSLKDLL

SEQ ID NO: 1617 - DNA, 1194 bp, Artificial Sequence
  variant of human alpha-galactosidase A
ctggataatggattggctagaacacctcctatggggtggcttcactgggagaggttcatgtgcaacctggactgtcaggaagaaccagacagctgcatctccgagaagctctttgaggaaatggccgaaaagatggtgactgagggctggaaagatgcaggttacgagtatctgtgtattgacgattgctggatggccccacaacgggattctgagggaagacttcaggctgatccgcagcgcttccctcatggcataaggcagctggcaaaccacgtccacagtaaggggctcaaattgggaatctacgcggacgtgggcaataagacctgtgccggttttccgggatcattcgggtattatgacattgacgcccaaacgtttgctgattggggcgttgacctgctgaaattcgatggttgctactgtgacagcctcgaaaacctggcagacggctacaagcatatgtctctcgccctgaatagaaccggtcggccaatcgtatattcctgcgagtggcctctttacatgtggccatttcagaaaccgaactacacagaaattcgccagtattgcaatcattggaggaacttcgctgatatcgatgactcatgggcctccataaagagcatcttggactggaccagtcggaatcaggagcgaattgtggatgtcgcaggccctggaggatggaacgatccagacatgctggtgatcggcaattttggcctctcttgggaccagcaggttacccaaatggctctgtgggcaattatggccggtcctcttttcatgagcaacgatctgcgcgcgatctcaccacaggcaaaggccctgctccaagacaaagatgtgatagccatcaatcaggacccgttgggaaagcagggctaccagctgagaaaaggcgacaactttgaggtctgggaaaggcctttgagtggagatgcgtgggctgtggccattattaatcggcaagagatcggaggtccacgctcctatacaattcctgtagcatctcttggcaagggcgttgcctgtaacccagcttgcttcatcactcagcttctgccggtgaagagaaaactgggtttctacgaagctaccagcaggctccgatcccacatcaaccctacaggaaccgtcctcttgcagctggagaatacgatgcagacttcactgaaggacctcctg

SEQ ID NO: 1618 - protein, 398 aa, Artificial Sequence
  variant of human alpha-galactosidase A
LDNGLARTPPMGWLHWERFMCNLDCQEEPDSCISEKLFEEMAEKMVTEGWKDAGYEYLCIDDCWMAPQRDSEGRLQADPQRFPHGIRQLANHVHSKGLKLGIYADVGNKTCAGFPGSFGYYDIDAQTFADWGVDLLKFDGCYCDSLENLADGYKHMSLALNRTGRPIVYSCEWPLYMWPFQKPNYTEIRQYCNHWRNFADIDDSWASIKSILDWTSRNQERIVDVAGPGGWNDPDMLVIGNFGLSWDQQVTQMALWAIMAGPLFMSNDLRAISPQAKALLQDKDVIAINQDPLGKQGYQLRKGDNFEVWERPLSGDAWAVAIINRQEIGGPRSYTIPVASLGKGVACNPACFITQLLPVKRKLGFYEATSRLRSHINPTGTVLLQLENTMQTSLKDLL

SEQ ID NO: 1619 - DNA, 1194 bp, Artificial Sequence
  variant of human alpha-galactosidase A
ctggataatggattggctagaacacctcctatggggtggcttcactgggagaggttcatgtgcaacctggactgtcaggaagaaccagacagctgcatctccgagaagctctttgaggaaatggccgaactgatggtgactgagggctggaaagatgcaggttacgagtatctgtgtattgacgattgctggatggccccacaacgggattctgagggaagacttcaggctgatccgcagcgcttccctcatggcataaggcagctggcaaaccacgtccacagtaaggggctcaaattgggaatctacgcggacgtgggcaataagacctgtgccggttttccgggatcattcgggtattatgacattgacgcccaaacgtttgctgattggggcgttgacctgctgaaattcgatggttgctactgtgacagcctcgaaaacctggcagacggctacaagcatatgtctctcgccctgaatagaaccggtcggccaatcgtatattcctgcgagtggcctctttacatgtggccatttcagaaaccgaactacacagaaattcgccagtattgcaatcattggaggaacttcgctgatatcgatgactcatgggcctccataaagagcatcttggactggaccagtcggaatcaggagcgaattgtggatgtcgcaggccctggaggatggaacgatccagacatgctggtgatcggcaattttggcctctcttgggaccagcaggttacccaaatggctctgtgggcaattatggccggtcctcttttcatgagcaacgatctgcgcgcgatctcaccacaggcaaaggccctgctccaagacaaagatgtgatagccatcaatcaggacccgttgggaaagcagggctaccagctgagaaaaggcgacaactttgaggtctgggaaaggcctttgagtggagatgcgtgggctgtggccattattaatcggcaagagatcggaggtccacgctcctatacaattcctgtagcatctcttggcaagggcgttgcctgtaacccagcttgcttcatcactcagcttctgccggtgaagagaaaactgggtttctacgaagctaccagcaggctccgatcccacatcaaccctacaggaaccgtcctcttgcagctggagaatacgatgcagacttcactgaaggacctcctg

SEQ ID NO: 1620 - protein, 398 aa, Artificial Sequence
  variant of human alpha-galactosidase A
LDNGLARTPPMGWLHWERFMCNLDCQEEPDSCISEKLFEEMAELMVTEGWKDAGYEYLCIDDCWMAPQRDSEGRLQADPQRFPHGIRQLANHVHSKGLKLGIYADVGNKTCAGFPGSFGYYDIDAQTFADWGVDLLKFDGCYCDSLENLADGYKHMSLALNRTGRPIVYSCEWPLYMWPFQKPNYTEIRQYCNHWRNFADIDDSWASIKSILDWTSRNQERIVDVAGPGGWNDPDMLVIGNFGLSWDQQVTQMALWAIMAGPLFMSNDLRAISPQAKALLQDKDVIAINQDPLGKQGYQLRKGDNFEVWERPLSGDAWAVAIINRQEIGGPRSYTIPVASLGKGVACNPACFITQLLPVKRKLGFYEATSRLRSHINPTGTVLLQLENTMQTSLKDLL

SEQ ID NO: 1621 - DNA, 1194 bp, Artificial Sequence
  variant of human alpha-galactosidase A
ctggataatggattggctagaacacctcctatggggtggcttcactgggagaggttcatgtgcaacctggactgtcaggaagaaccagacagctgcatctccgagaagctctttgaggaaatggccgaaaatatggtgactgagggctggaaagatgcaggttacgagtatctgtgtattgacgattgctggatggccccacaacgggattctgagggaagacttcaggctgatccgcagcgcttccctcatggcataaggcagctggcaaaccacgtccacagtaaggggctcaaattgggaatctacgcggacgtgggcaataagacctgtgccggttttccgggatcattcgggtattatgacattgacgcccaaacgtttgctgattggggcgttgacctgctgaaattcgatggttgctactgtgacagcctcgaaaacctggcagacggctacaagcatatgtctctcgccctgaatagaaccggtcggccaatcgtatattcctgcgagtggcctctttacatgtggccatttcagaaaccgaactacacagaaattcgccagtattgcaatcattggaggaacttcgctgatatcgatgactcatgggcctccataaagagcatcttggactggaccagtcggaatcaggagcgaattgtggatgtcgcaggccctggaggatggaacgatccagacatgctggtgatcggcaattttggcctctcttgggaccagcaggttacccaaatggctctgtgggcaattatggccggtcctcttttcatgagcaacgatctgcgcgcgatctcaccacaggcaaaggccctgctccaagacaaagatgtgatagccatcaatcaggacccgttgggaaagcagggctaccagctgagaaaaggcgacaactttgaggtctgggaaaggcctttgagtggagatgcgtgggctgtggccattattaatcggcaagagatcggaggtccacgctcctatacaattcctgtagcatctcttggcaagggcgttgcctgtaacccagcttgcttcatcactcagcttctgccggtgaagagaaaactgggtttctacgaagctaccagcaggctccgatcccacatcaaccctacaggaaccgtcctcttgcagctggagaatacgatgcagacttcactgaaggacctcctg

SEQ ID NO: 1622 - protein, 398 aa, Artificial Sequence
  variant of human alpha-galactosidase A
LDNGLARTPPMGWLHWERFMCNLDCQEEPDSCISEKLFEEMAENMVTEGWKDAGYEYLCIDDCWMAPQRDSEGRLQADPQRFPHGIRQLANHVHSKGLKLGIYADVGNKTCAGFPGSFGYYDIDAQTFADWGVDLLKFDGCYCDSLENLADGYKHMSLALNRTGRPIVYSCEWPLYMWPFQKPNYTEIRQYCNHWRNFADIDDSWASIKSILDWTSRNQERIVDVAGPGGWNDPDMLVIGNFGLSWDQQVTQMALWAIMAGPLFMSNDLRAISPQAKALLQDKDVIAINQDPLGKQGYQLRKGDNFEVWERPLSGDAWAVAIINRQEIGGPRSYTIPVASLGKGVACNPACFITQLLPVKRKLGFYEATSRLRSHINPTGTVLLQLENTMQTSLKDLL

SEQ ID NO: 1623 - DNA, 1194 bp, Artificial Sequence
  variant of human alpha-galactosidase A
ctggataatggattggctagaacacctcctatggggtggcttcactgggagaggttcatgtgcaacctggactgtcaggaagaaccagacagctgcatctccgagaagctctttgaggaaatggccgaaccgatggtgactgagggctggaaagatgcaggttacgagtatctgtgtattgacgattgctggatggccccacaacgggattctgagggaagacttcaggctgatccgcagcgcttccctcatggcataaggcagctggcaaaccacgtccacagtaaggggctcaaattgggaatctacgcggacgtgggcaataagacctgtgccggttttccgggatcattcgggtattatgacattgacgcccaaacgtttgctgattggggcgttgacctgctgaaattcgatggttgctactgtgacagcctcgaaaacctggcagacggctacaagcatatgtctctcgccctgaatagaaccggtcggccaatcgtatattcctgcgagtggcctctttacatgtggccatttcagaaaccgaactacacagaaattcgccagtattgcaatcattggaggaacttcgctgatatcgatgactcatgggcctccataaagagcatcttggactggaccagtcggaatcaggagcgaattgtggatgtcgcaggccctggaggatggaacgatccagacatgctggtgatcggcaattttggcctctcttgggaccagcaggttacccaaatggctctgtgggcaattatggccggtcctcttttcatgagcaacgatctgcgcgcgatctcaccacaggcaaaggccctgctccaagacaaagatgtgatagccatcaatcaggacccgttgggaaagcagggctaccagctgagaaaaggcgacaactttgaggtctgggaaaggcctttgagtggagatgcgtgggctgtggccattattaatcggcaagagatcggaggtccacgctcctatacaattcctgtagcatctcttggcaagggcgttgcctgtaacccagcttgcttcatcactcagcttctgccggtgaagagaaaactgggtttctacgaagctaccagcaggctccgatcccacatcaaccctacaggaaccgtcctcttgcagctggagaatacgatgcagacttcactgaaggacctcctg

SEQ ID NO: 1624 - protein, 398 aa, Artificial Sequence
  variant of human alpha-galactosidase A
LDNGLARTPPMGWLHWERFMCNLDCQEEPDSCISEKLFEEMAEPMVTEGWKDAGYEYLCIDDCWMAPQRDSEGRLQADPQRFPHGIRQLANHVHSKGLKLGIYADVGNKTCAGFPGSFGYYDIDAQTFADWGVDLLKFDGCYCDSLENLADGYKHMSLALNRTGRPIVYSCEWPLYMWPFQKPNYTEIRQYCNHWRNFADIDDSWASIKSILDWTSRNQERIVDVAGPGGWNDPDMLVIGNFGLSWDQQVTQMALWAIMAGPLFMSNDLRAISPQAKALLQDKDVIAINQDPLGKQGYQLRKGDNFEVWERPLSGDAWAVAIINRQEIGGPRSYTIPVASLGKGVACNPACFITQLLPVKRKLGFYEATSRLRSHINPTGTVLLQLENTMQTSLKDLL

SEQ ID NO: 1625 - DNA, 1194 bp, Artificial Sequence
  variant of human alpha-galactosidase A
ctggataatggattggctagaacacctcctatggggtggcttcactgggagaggttcatgtgcaacctggactgtcaggaagaaccagacagctgcatctccgagaagctctttgaggaaatggccgaacagatggtgactgagggctggaaagatgcaggttacgagtatctgtgtattgacgattgctggatggccccacaacgggattctgagggaagacttcaggctgatccgcagcgcttccctcatggcataaggcagctggcaaaccacgtccacagtaaggggctcaaattgggaatctacgcggacgtgggcaataagacctgtgccggttttccgggatcattcgggtattatgacattgacgcccaaacgtttgctgattggggcgttgacctgctgaaattcgatggttgctactgtgacagcctcgaaaacctggcagacggctacaagcatatgtctctcgccctgaatagaaccggtcggccaatcgtatattcctgcgagtggcctctttacatgtggccatttcagaaaccgaactacacagaaattcgccagtattgcaatcattggaggaacttcgctgatatcgatgactcatgggcctccataaagagcatcttggactggaccagtcggaatcaggagcgaattgtggatgtcgcaggccctggaggatggaacgatccagacatgctggtgatcggcaattttggcctctcttgggaccagcaggttacccaaatggctctgtgggcaattatggccggtcctcttttcatgagcaacgatctgcgcgcgatctcaccacaggcaaaggccctgctccaagacaaagatgtgatagccatcaatcaggacccgttgggaaagcagggctaccagctgagaaaaggcgacaactttgaggtctgggaaaggcctttgagtggagatgcgtgggctgtggccattattaatcggcaagagatcggaggtccacgctcctatacaattcctgtagcatctcttggcaagggcgttgcctgtaacccagcttgcttcatcactcagcttctgccggtgaagagaaaactgggtttctacgaagctaccagcaggctccgatcccacatcaaccctacaggaaccgtcctcttgcagctggagaatacgatgcagacttcactgaaggacctcctg

SEQ ID NO: 1626 - protein, 398 aa, Artificial Sequence
  variant of human alpha-galactosidase A
LDNGLARTPPMGWLHWERFMCNLDCQEEPDSCISEKLFEEMAEQMVTEGWKDAGYEYLCIDDCWMAPQRDSEGRLQADPQRFPHGIRQLANHVHSKGLKLGIYADVGNKTCAGFPGSFGYYDIDAQTFADWGVDLLKFDGCYCDSLENLADGYKHMSLALNRTGRPIVYSCEWPLYMWPFQKPNYTEIRQYCNHWRNFADIDDSWASIKSILDWTSRNQERIVDVAGPGGWNDPDMLVIGNFGLSWDQQVTQMALWAIMAGPLFMSNDLRAISPQAKALLQDKDVIAINQDPLGKQGYQLRKGDNFEVWERPLSGDAWAVAIINRQEIGGPRSYTIPVASLGKGVACNPACFITQLLPVKRKLGFYEATSRLRSHINPTGTVLLQLENTMQTSLKDLL

SEQ ID NO: 1627 - DNA, 1194 bp, Artificial Sequence
  variant of human alpha-galactosidase A
ctggataatggattggctagaacacctcctatggggtggcttcactgggagaggttcatgtgcaacctggactgtcaggaagaaccagacagctgcatctccgagaagctctttgaggaaatggccgaaagtatggtgactgagggctggaaagatgcaggttacgagtatctgtgtattgacgattgctggatggccccacaacgggattctgagggaagacttcaggctgatccgcagcgcttccctcatggcataaggcagctggcaaaccacgtccacagtaaggggctcaaattgggaatctacgcggacgtgggcaataagacctgtgccggttttccgggatcattcgggtattatgacattgacgcccaaacgtttgctgattggggcgttgacctgctgaaattcgatggttgctactgtgacagcctcgaaaacctggcagacggctacaagcatatgtctctcgccctgaatagaaccggtcggccaatcgtatattcctgcgagtggcctctttacatgtggccatttcagaaaccgaactacacagaaattcgccagtattgcaatcattggaggaacttcgctgatatcgatgactcatgggcctccataaagagcatcttggactggaccagtcggaatcaggagcgaattgtggatgtcgcaggccctggaggatggaacgatccagacatgctggtgatcggcaattttggcctctcttgggaccagcaggttacccaaatggctctgtgggcaattatggccggtcctcttttcatgagcaacgatctgcgcgcgatctcaccacaggcaaaggccctgctccaagacaaagatgtgatagccatcaatcaggacccgttgggaaagcagggctaccagctgagaaaaggcgacaactttgaggtctgggaaaggcctttgagtggagatgcgtgggctgtggccattattaatcggcaagagatcggaggtccacgctcctatacaattcctgtagcatctcttggcaagggcgttgcctgtaacccagcttgcttcatcactcagcttctgccggtgaagagaaaactgggtttctacgaagctaccagcaggctccgatcccacatcaaccctacaggaaccgtcctcttgcagctggagaatacgatgcagacttcactgaaggacctcctg

SEQ ID NO: 1628 - protein, 398 aa, Artificial Sequence
  variant of human alpha-galactosidase A
LDNGLARTPPMGWLHWERFMCNLDCQEEPDSCISEKLFEEMAESMVTEGWKDAGYEYLCIDDCWMAPQRDSEGRLQADPQRFPHGIRQLANHVHSKGLKLGIYADVGNKTCAGFPGSFGYYDIDAQTFADWGVDLLKFDGCYCDSLENLADGYKHMSLALNRTGRPIVYSCEWPLYMWPFQKPNYTEIRQYCNHWRNFADIDDSWASIKSILDWTSRNQERIVDVAGPGGWNDPDMLVIGNFGLSWDQQVTQMALWAIMAGPLFMSNDLRAISPQAKALLQDKDVIAINQDPLGKQGYQLRKGDNFEVWERPLSGDAWAVAIINRQEIGGPRSYTIPVASLGKGVACNPACFITQLLPVKRKLGFYEATSRLRSHINPTGTVLLQLENTMQTSLKDLL

SEQ ID NO: 1629 - DNA, 1194 bp, Artificial Sequence
  variant of human alpha-galactosidase A
ctggataatggattggctagaacacctcctatggggtggcttcactgggagaggttcatgtgcaacctggactgtcaggaagaaccagacagctgcatctccgagaagctctttgaggaaatggccgaaaccatggtgactgagggctggaaagatgcaggttacgagtatctgtgtattgacgattgctggatggccccacaacgggattctgagggaagacttcaggctgatccgcagcgcttccctcatggcataaggcagctggcaaaccacgtccacagtaaggggctcaaattgggaatctacgcggacgtgggcaataagacctgtgccggttttccgggatcattcgggtattatgacattgacgcccaaacgtttgctgattggggcgttgacctgctgaaattcgatggttgctactgtgacagcctcgaaaacctggcagacggctacaagcatatgtctctcgccctgaatagaaccggtcggccaatcgtatattcctgcgagtggcctctttacatgtggccatttcagaaaccgaactacacagaaattcgccagtattgcaatcattggaggaacttcgctgatatcgatgactcatgggcctccataaagagcatcttggactggaccagtcggaatcaggagcgaattgtggatgtcgcaggccctggaggatggaacgatccagacatgctggtgatcggcaattttggcctctcttgggaccagcaggttacccaaatggctctgtgggcaattatggccggtcctcttttcatgagcaacgatctgcgcgcgatctcaccacaggcaaaggccctgctccaagacaaagatgtgatagccatcaatcaggacccgttgggaaagcagggctaccagctgagaaaaggcgacaactttgaggtctgggaaaggcctttgagtggagatgcgtgggctgtggccattattaatcggcaagagatcggaggtccacgctcctatacaattcctgtagcatctcttggcaagggcgttgcctgtaacccagcttgcttcatcactcagcttctgccggtgaagagaaaactgggtttctacgaagctaccagcaggctccgatcccacatcaaccctacaggaaccgtcctcttgcagctggagaatacgatgcagacttcactgaaggacctcctg

SEQ ID NO: 1630 - protein, 398 aa, Artificial Sequence
  variant of human alpha-galactosidase A
LDNGLARTPPMGWLHWERFMCNLDCQEEPDSCISEKLFEEMAETMVTEGWKDAGYEYLCIDDCWMAPQRDSEGRLQADPQRFPHGIRQLANHVHSKGLKLGIYADVGNKTCAGFPGSFGYYDIDAQTFADWGVDLLKFDGCYCDSLENLADGYKHMSLALNRTGRPIVYSCEWPLYMWPFQKPNYTEIRQYCNHWRNFADIDDSWASIKSILDWTSRNQERIVDVAGPGGWNDPDMLVIGNFGLSWDQQVTQMALWAIMAGPLFMSNDLRAISPQAKALLQDKDVIAINQDPLGKQGYQLRKGDNFEVWERPLSGDAWAVAIINRQEIGGPRSYTIPVASLGKGVACNPACFITQLLPVKRKLGFYEATSRLRSHINPTGTVLLQLENTMQTSLKDLL

SEQ ID NO: 1631 - DNA, 1194 bp, Artificial Sequence
  variant of human alpha-galactosidase A
ctggataatggattggctagaacacctcctatggggtggcttcactgggagaggttcatgtgcaacctggactgtcaggaagaaccagacagctgcatctccgagaagctctttgaggaaatggccgaagttatggtgactgagggctggaaagatgcaggttacgagtatctgtgtattgacgattgctggatggccccacaacgggattctgagggaagacttcaggctgatccgcagcgcttccctcatggcataaggcagctggcaaaccacgtccacagtaaggggctcaaattgggaatctacgcggacgtgggcaataagacctgtgccggttttccgggatcattcgggtattatgacattgacgcccaaacgtttgctgattggggcgttgacctgctgaaattcgatggttgctactgtgacagcctcgaaaacctggcagacggctacaagcatatgtctctcgccctgaatagaaccggtcggccaatcgtatattcctgcgagtggcctctttacatgtggccatttcagaaaccgaactacacagaaattcgccagtattgcaatcattggaggaacttcgctgatatcgatgactcatgggcctccataaagagcatcttggactggaccagtcggaatcaggagcgaattgtggatgtcgcaggccctggaggatggaacgatccagacatgctggtgatcggcaattttggcctctcttgggaccagcaggttacccaaatggctctgtgggcaattatggccggtcctcttttcatgagcaacgatctgcgcgcgatctcaccacaggcaaaggccctgctccaagacaaagatgtgatagccatcaatcaggacccgttgggaaagcagggctaccagctgagaaaaggcgacaactttgaggtctgggaaaggcctttgagtggagatgcgtgggctgtggccattattaatcggcaagagatcggaggtccacgctcctatacaattcctgtagcatctcttggcaagggcgttgcctgtaacccagcttgcttcatcactcagcttctgccggtgaagagaaaactgggtttctacgaagctaccagcaggctccgatcccacatcaaccctacaggaaccgtcctcttgcagctggagaatacgatgcagacttcactgaaggacctcctg

SEQ ID NO: 1632 - protein, 398 aa, Artificial Sequence
  variant of human alpha-galactosidase A
LDNGLARTPPMGWLHWERFMCNLDCQEEPDSCISEKLFEEMAEVMVTEGWKDAGYEYLCIDDCWMAPQRDSEGRLQADPQRFPHGIRQLANHVHSKGLKLGIYADVGNKTCAGFPGSFGYYDIDAQTFADWGVDLLKFDGCYCDSLENLADGYKHMSLALNRTGRPIVYSCEWPLYMWPFQKPNYTEIRQYCNHWRNFADIDDSWASIKSILDWTSRNQERIVDVAGPGGWNDPDMLVIGNFGLSWDQQVTQMALWAIMAGPLFMSNDLRAISPQAKALLQDKDVIAINQDPLGKQGYQLRKGDNFEVWERPLSGDAWAVAIINRQEIGGPRSYTIPVASLGKGVACNPACFITQLLPVKRKLGFYEATSRLRSHINPTGTVLLQLENTMQTSLKDLL

SEQ ID NO: 1633 - DNA, 1194 bp, Artificial Sequence
  variant of human alpha-galactosidase A
ctggataatggattggctagaacacctcctatggggtggcttcactgggagaggttcatgtgcaacctggactgtcaggaagaaccagacagctgcatctccgagaagctctttgaggaaatggccgaatggatggtgactgagggctggaaagatgcaggttacgagtatctgtgtattgacgattgctggatggccccacaacgggattctgagggaagacttcaggctgatccgcagcgcttccctcatggcataaggcagctggcaaaccacgtccacagtaaggggctcaaattgggaatctacgcggacgtgggcaataagacctgtgccggttttccgggatcattcgggtattatgacattgacgcccaaacgtttgctgattggggcgttgacctgctgaaattcgatggttgctactgtgacagcctcgaaaacctggcagacggctacaagcatatgtctctcgccctgaatagaaccggtcggccaatcgtatattcctgcgagtggcctctttacatgtggccatttcagaaaccgaactacacagaaattcgccagtattgcaatcattggaggaacttcgctgatatcgatgactcatgggcctccataaagagcatcttggactggaccagtcggaatcaggagcgaattgtggatgtcgcaggccctggaggatggaacgatccagacatgctggtgatcggcaattttggcctctcttgggaccagcaggttacccaaatggctctgtgggcaattatggccggtcctcttttcatgagcaacgatctgcgcgcgatctcaccacaggcaaaggccctgctccaagacaaagatgtgatagccatcaatcaggacccgttgggaaagcagggctaccagctgagaaaaggcgacaactttgaggtctgggaaaggcctttgagtggagatgcgtgggctgtggccattattaatcggcaagagatcggaggtccacgctcctatacaattcctgtagcatctcttggcaagggcgttgcctgtaacccagcttgcttcatcactcagcttctgccggtgaagagaaaactgggtttctacgaagctaccagcaggctccgatcccacatcaaccctacaggaaccgtcctcttgcagctggagaatacgatgcagacttcactgaaggacctcctg

SEQ ID NO: 1634 - protein, 398 aa, Artificial Sequence
  variant of human alpha-galactosidase A
LDNGLARTPPMGWLHWERFMCNLDCQEEPDSCISEKLFEEMAEWMVTEGWKDAGYEYLCIDDCWMAPQRDSEGRLQADPQRFPHGIRQLANHVHSKGLKLGIYADVGNKTCAGFPGSFGYYDIDAQTFADWGVDLLKFDGCYCDSLENLADGYKHMSLALNRTGRPIVYSCEWPLYMWPFQKPNYTEIRQYCNHWRNFADIDDSWASIKSILDWTSRNQERIVDVAGPGGWNDPDMLVIGNFGLSWDQQVTQMALWAIMAGPLFMSNDLRAISPQAKALLQDKDVIAINQDPLGKQGYQLRKGDNFEVWERPLSGDAWAVAIINRQEIGGPRSYTIPVASLGKGVACNPACFITQLLPVKRKLGFYEATSRLRSHINPTGTVLLQLENTMQTSLKDLL

SEQ ID NO: 1635 - DNA, 1194 bp, Artificial Sequence
  variant of human alpha-galactosidase A
ctggataatggattggctagaacacctcctatggggtggcttcactgggagaggttcatgtgcaacctggactgtcaggaagaaccagacagctgcatctccgagaagctctttgaggaaatggccgaatatatggtgactgagggctggaaagatgcaggttacgagtatctgtgtattgacgattgctggatggccccacaacgggattctgagggaagacttcaggctgatccgcagcgcttccctcatggcataaggcagctggcaaaccacgtccacagtaaggggctcaaattgggaatctacgcggacgtgggcaataagacctgtgccggttttccgggatcattcgggtattatgacattgacgcccaaacgtttgctgattggggcgttgacctgctgaaattcgatggttgctactgtgacagcctcgaaaacctggcagacggctacaagcatatgtctctcgccctgaatagaaccggtcggccaatcgtatattcctgcgagtggcctctttacatgtggccatttcagaaaccgaactacacagaaattcgccagtattgcaatcattggaggaacttcgctgatatcgatgactcatgggcctccataaagagcatcttggactggaccagtcggaatcaggagcgaattgtggatgtcgcaggccctggaggatggaacgatccagacatgctggtgatcggcaattttggcctctcttgggaccagcaggttacccaaatggctctgtgggcaattatggccggtcctcttttcatgagcaacgatctgcgcgcgatctcaccacaggcaaaggccctgctccaagacaaagatgtgatagccatcaatcaggacccgttgggaaagcagggctaccagctgagaaaaggcgacaactttgaggtctgggaaaggcctttgagtggagatgcgtgggctgtggccattattaatcggcaagagatcggaggtccacgctcctatacaattcctgtagcatctcttggcaagggcgttgcctgtaacccagcttgcttcatcactcagcttctgccggtgaagagaaaactgggtttctacgaagctaccagcaggctccgatcccacatcaaccctacaggaaccgtcctcttgcagctggagaatacgatgcagacttcactgaaggacctcctg

SEQ ID NO: 1636 - protein, 398 aa, Artificial Sequence
  variant of human alpha-galactosidase A
LDNGLARTPPMGWLHWERFMCNLDCQEEPDSCISEKLFEEMAEYMVTEGWKDAGYEYLCIDDCWMAPQRDSEGRLQADPQRFPHGIRQLANHVHSKGLKLGIYADVGNKTCAGFPGSFGYYDIDAQTFADWGVDLLKFDGCYCDSLENLADGYKHMSLALNRTGRPIVYSCEWPLYMWPFQKPNYTEIRQYCNHWRNFADIDDSWASIKSILDWTSRNQERIVDVAGPGGWNDPDMLVIGNFGLSWDQQVTQMALWAIMAGPLFMSNDLRAISPQAKALLQDKDVIAINQDPLGKQGYQLRKGDNFEVWERPLSGDAWAVAIINRQEIGGPRSYTIPVASLGKGVACNPACFITQLLPVKRKLGFYEATSRLRSHINPTGTVLLQLENTMQTSLKDLL

SEQ ID NO: 1637 - DNA, 1194 bp, Artificial Sequence
  variant of human alpha-galactosidase A
ctggataatggattggctagaacacctcctatggggtggcttcactgggagaggttcatgtgcaacctggactgtcaggaagaaccagacagctgcatctccgagaagctctttgaggaaatggccgaacgaatggtgactgagggctggaaagatgcaggttacgagtatctgtgtattgacgattgctggatggccccacaacgggattctgagggaagacttcaggctgatccgcagcgcttccctcatggcataaggcagctggcaaaccacgtccacagtaaggggctcaaattgggaatctacgcggacgtgggcaataagacctgtgccggttttccgggatcattcgggtattatgacattgacgcccaaacgtttgctgattggggcgttgacctgctgaaattcgatggttgctactgtgacagcctcgaaaacctggcagacggctacaagcatatgtctctcgccctgaatagaaccggtcggccaatcgtatattcctgcgagtggcctctttacatgtggccatttcagaaaccgaactacacagaaattcgccagtattgcaatcattggaggaacttcgctgatatcgatgactcatgggcctccataaagagcatcttggactggaccagtcggaatcaggagcgaattgtggatgtcgcaggccctggaggatggaacgatccagacatgctggtgatcggcaattttggcctctcttgggaccagcaggttacccaaatggctctgtgggcaattatggccggtcctcttttcatgagcaacgatctgcgcgcgatctcaccacaggcaaaggccctgctccaagacaaagatgtgatagccatcaatcaggacccgttgggaaagcagggctaccagctgagaaaaggcgacaactttgaggtctgggaaaggcctttgagtggagatgcgtgggctgtggccattattaatcggcaagagatcggaggtccacgctcctatacaattcctgtagcatctcttggcaagggcgttgcctgtaacccagcttgcttcatcactcagcttctgccggtgaagagaaaactgggtttctacgaagctaccagcaggctccgatcccacatcaaccctacaggaaccgtcctcttgcagctggagaatacgatgcaggcgtcactgaaggacctcctg

SEQ ID NO: 1638 - protein, 398 aa, Artificial Sequence
  variant of human alpha-galactosidase A
LDNGLARTPPMGWLHWERFMCNLDCQEEPDSCISEKLFEEMAERMVTEGWKDAGYEYLCIDDCWMAPQRDSEGRLQADPQRFPHGIRQLANHVHSKGLKLGIYADVGNKTCAGFPGSFGYYDIDAQTFADWGVDLLKFDGCYCDSLENLADGYKHMSLALNRTGRPIVYSCEWPLYMWPFQKPNYTEIRQYCNHWRNFADIDDSWASIKSILDWTSRNQERIVDVAGPGGWNDPDMLVIGNFGLSWDQQVTQMALWAIMAGPLFMSNDLRAISPQAKALLQDKDVIAINQDPLGKQGYQLRKGDNFEVWERPLSGDAWAVAIINRQEIGGPRSYTIPVASLGKGVACNPACFITQLLPVKRKLGFYEATSRLRSHINPTGTVLLQLENTMQASLKDLL

SEQ ID NO: 1639 - DNA, 1194 bp, Artificial Sequence
  variant of human alpha-galactosidase A
ctggataatggattggctagaacacctcctatggggtggcttcactgggagaggttcatgtgcaacctggactgtcaggaagaaccagacagctgcatctccgagaagctctttgaggaaatggccgaacgaatggtgactgagggctggaaagatgcaggttacgagtatctgtgtattgacgattgctggatggccccacaacgggattctgagggaagacttcaggctgatccgcagcgcttccctcatggcataaggcagctggcaaaccacgtccacagtaaggggctcaaattgggaatctacgcggacgtgggcaataagacctgtgccggttttccgggatcattcgggtattatgacattgacgcccaaacgtttgctgattggggcgttgacctgctgaaattcgatggttgctactgtgacagcctcgaaaacctggcagacggctacaagcatatgtctctcgccctgaatagaaccggtcggccaatcgtatattcctgcgagtggcctctttacatgtggccatttcagaaaccgaactacacagaaattcgccagtattgcaatcattggaggaacttcgctgatatcgatgactcatgggcctccataaagagcatcttggactggaccagtcggaatcaggagcgaattgtggatgtcgcaggccctggaggatggaacgatccagacatgctggtgatcggcaattttggcctctcttgggaccagcaggttacccaaatggctctgtgggcaattatggccggtcctcttttcatgagcaacgatctgcgcgcgatctcaccacaggcaaaggccctgctccaagacaaagatgtgatagccatcaatcaggacccgttgggaaagcagggctaccagctgagaaaaggcgacaactttgaggtctgggaaaggcctttgagtggagatgcgtgggctgtggccattattaatcggcaagagatcggaggtccacgctcctatacaattcctgtagcatctcttggcaagggcgttgcctgtaacccagcttgcttcatcactcagcttctgccggtgaagagaaaactgggtttctacgaagctaccagcaggctccgatcccacatcaaccctacaggaaccgtcctcttgcagctggagaatacgatgcagtgttcactgaaggacctcctg

SEQ ID NO: 1640 - protein, 398 aa, Artificial Sequence
  variant of human alpha-galactosidase A
LDNGLARTPPMGWLHWERFMCNLDCQEEPDSCISEKLFEEMAERMVTEGWKDAGYEYLCIDDCWMAPQRDSEGRLQADPQRFPHGIRQLANHVHSKGLKLGIYADVGNKTCAGFPGSFGYYDIDAQTFADWGVDLLKFDGCYCDSLENLADGYKHMSLALNRTGRPIVYSCEWPLYMWPFQKPNYTEIRQYCNHWRNFADIDDSWASIKSILDWTSRNQERIVDVAGPGGWNDPDMLVIGNFGLSWDQQVTQMALWAIMAGPLFMSNDLRAISPQAKALLQDKDVIAINQDPLGKQGYQLRKGDNFEVWERPLSGDAWAVAIINRQEIGGPRSYTIPVASLGKGVACNPACFITQLLPVKRKLGFYEATSRLRSHINPTGTVLLQLENTMQCSLKDLL

SEQ ID NO: 1641 - DNA, 1194 bp, Artificial Sequence
  variant of human alpha-galactosidase A
ctggataatggattggctagaacacctcctatggggtggcttcactgggagaggttcatgtgcaacctggactgtcaggaagaaccagacagctgcatctccgagaagctctttgaggaaatggccgaacgaatggtgactgagggctggaaagatgcaggttacgagtatctgtgtattgacgattgctggatggccccacaacgggattctgagggaagacttcaggctgatccgcagcgcttccctcatggcataaggcagctggcaaaccacgtccacagtaaggggctcaaattgggaatctacgcggacgtgggcaataagacctgtgccggttttccgggatcattcgggtattatgacattgacgcccaaacgtttgctgattggggcgttgacctgctgaaattcgatggttgctactgtgacagcctcgaaaacctggcagacggctacaagcatatgtctctcgccctgaatagaaccggtcggccaatcgtatattcctgcgagtggcctctttacatgtggccatttcagaaaccgaactacacagaaattcgccagtattgcaatcattggaggaacttcgctgatatcgatgactcatgggcctccataaagagcatcttggactggaccagtcggaatcaggagcgaattgtggatgtcgcaggccctggaggatggaacgatccagacatgctggtgatcggcaattttggcctctcttgggaccagcaggttacccaaatggctctgtgggcaattatggccggtcctcttttcatgagcaacgatctgcgcgcgatctcaccacaggcaaaggccctgctccaagacaaagatgtgatagccatcaatcaggacccgttgggaaagcagggctaccagctgagaaaaggcgacaactttgaggtctgggaaaggcctttgagtggagatgcgtgggctgtggccattattaatcggcaagagatcggaggtccacgctcctatacaattcctgtagcatctcttggcaagggcgttgcctgtaacccagcttgcttcatcactcagcttctgccggtgaagagaaaactgggtttctacgaagctaccagcaggctccgatcccacatcaaccctacaggaaccgtcctcttgcagctggagaatacgatgcaggactcactgaaggacctcctg

SEQ ID NO: 1642 - protein, 398 aa, Artificial Sequence
  variant of human alpha-galactosidase A
LDNGLARTPPMGWLHWERFMCNLDCQEEPDSCISEKLFEEMAERMVTEGWKDAGYEYLCIDDCWMAPQRDSEGRLQADPQRFPHGIRQLANHVHSKGLKLGIYADVGNKTCAGFPGSFGYYDIDAQTFADWGVDLLKFDGCYCDSLENLADGYKHMSLALNRTGRPIVYSCEWPLYMWPFQKPNYTEIRQYCNHWRNFADIDDSWASIKSILDWTSRNQERIVDVAGPGGWNDPDMLVIGNFGLSWDQQVTQMALWAIMAGPLFMSNDLRAISPQAKALLQDKDVIAINQDPLGKQGYQLRKGDNFEVWERPLSGDAWAVAIINRQEIGGPRSYTIPVASLGKGVACNPACFITQLLPVKRKLGFYEATSRLRSHINPTGTVLLQLENTMQDSLKDLL

SEQ ID NO: 1643 - DNA, 1194 bp, Artificial Sequence
  variant of human alpha-galactosidase A
ctggataatggattggctagaacacctcctatggggtggcttcactgggagaggttcatgtgcaacctggactgtcaggaagaaccagacagctgcatctccgagaagctctttgaggaaatggccgaacgaatggtgactgagggctggaaagatgcaggttacgagtatctgtgtattgacgattgctggatggccccacaacgggattctgagggaagacttcaggctgatccgcagcgcttccctcatggcataaggcagctggcaaaccacgtccacagtaaggggctcaaattgggaatctacgcggacgtgggcaataagacctgtgccggttttccgggatcattcgggtattatgacattgacgcccaaacgtttgctgattggggcgttgacctgctgaaattcgatggttgctactgtgacagcctcgaaaacctggcagacggctacaagcatatgtctctcgccctgaatagaaccggtcggccaatcgtatattcctgcgagtggcctctttacatgtggccatttcagaaaccgaactacacagaaattcgccagtattgcaatcattggaggaacttcgctgatatcgatgactcatgggcctccataaagagcatcttggactggaccagtcggaatcaggagcgaattgtggatgtcgcaggccctggaggatggaacgatccagacatgctggtgatcggcaattttggcctctcttgggaccagcaggttacccaaatggctctgtgggcaattatggccggtcctcttttcatgagcaacgatctgcgcgcgatctcaccacaggcaaaggccctgctccaagacaaagatgtgatagccatcaatcaggacccgttgggaaagcagggctaccagctgagaaaaggcgacaactttgaggtctgggaaaggcctttgagtggagatgcgtgggctgtggccattattaatcggcaagagatcggaggtccacgctcctatacaattcctgtagcatctcttggcaagggcgttgcctgtaacccagcttgcttcatcactcagcttctgccggtgaagagaaaactgggtttctacgaagctaccagcaggctccgatcccacatcaaccctacaggaaccgtcctcttgcagctggagaatacgatgcaggagtcactgaaggacctcctg

SEQ ID NO: 1644 - protein, 398 aa, Artificial Sequence
  variant of human alpha-galactosidase A
LDNGLARTPPMGWLHWERFMCNLDCQEEPDSCISEKLFEEMAERMVTEGWKDAGYEYLCIDDCWMAPQRDSEGRLQADPQRFPHGIRQLANHVHSKGLKLGIYADVGNKTCAGFPGSFGYYDIDAQTFADWGVDLLKFDGCYCDSLENLADGYKHMSLALNRTGRPIVYSCEWPLYMWPFQKPNYTEIRQYCNHWRNFADIDDSWASIKSILDWTSRNQERIVDVAGPGGWNDPDMLVIGNFGLSWDQQVTQMALWAIMAGPLFMSNDLRAISPQAKALLQDKDVIAINQDPLGKQGYQLRKGDNFEVWERPLSGDAWAVAIINRQEIGGPRSYTIPVASLGKGVACNPACFITQLLPVKRKLGFYEATSRLRSHINPTGTVLLQLENTMQESLKDLL

SEQ ID NO: 1645 - DNA, 1194 bp, Artificial Sequence
  variant of human alpha-galactosidase A
ctggataatggattggctagaacacctcctatggggtggcttcactgggagaggttcatgtgcaacctggactgtcaggaagaaccagacagctgcatctccgagaagctctttgaggaaatggccgaacgaatggtgactgagggctggaaagatgcaggttacgagtatctgtgtattgacgattgctggatggccccacaacgggattctgagggaagacttcaggctgatccgcagcgcttccctcatggcataaggcagctggcaaaccacgtccacagtaaggggctcaaattgggaatctacgcggacgtgggcaataagacctgtgccggttttccgggatcattcgggtattatgacattgacgcccaaacgtttgctgattggggcgttgacctgctgaaattcgatggttgctactgtgacagcctcgaaaacctggcagacggctacaagcatatgtctctcgccctgaatagaaccggtcggccaatcgtatattcctgcgagtggcctctttacatgtggccatttcagaaaccgaactacacagaaattcgccagtattgcaatcattggaggaacttcgctgatatcgatgactcatgggcctccataaagagcatcttggactggaccagtcggaatcaggagcgaattgtggatgtcgcaggccctggaggatggaacgatccagacatgctggtgatcggcaattttggcctctcttgggaccagcaggttacccaaatggctctgtgggcaattatggccggtcctcttttcatgagcaacgatctgcgcgcgatctcaccacaggcaaaggccctgctccaagacaaagatgtgatagccatcaatcaggacccgttgggaaagcagggctaccagctgagaaaaggcgacaactttgaggtctgggaaaggcctttgagtggagatgcgtgggctgtggccattattaatcggcaagagatcggaggtccacgctcctatacaattcctgtagcatctcttggcaagggcgttgcctgtaacccagcttgcttcatcactcagcttctgccggtgaagagaaaactgggtttctacgaagctaccagcaggctccgatcccacatcaaccctacaggaaccgtcctcttgcagctggagaatacgatgcagttttcactgaaggacctcctg

SEQ ID NO: 1646 - protein, 398 aa, Artificial Sequence
  variant of human alpha-galactosidase A
LDNGLARTPPMGWLHWERFMCNLDCQEEPDSCISEKLFEEMAERMVTEGWKDAGYEYLCIDDCWMAPQRDSEGRLQADPQRFPHGIRQLANHVHSKGLKLGIYADVGNKTCAGFPGSFGYYDIDAQTFADWGVDLLKFDGCYCDSLENLADGYKHMSLALNRTGRPIVYSCEWPLYMWPFQKPNYTEIRQYCNHWRNFADIDDSWASIKSILDWTSRNQERIVDVAGPGGWNDPDMLVIGNFGLSWDQQVTQMALWAIMAGPLFMSNDLRAISPQAKALLQDKDVIAINQDPLGKQGYQLRKGDNFEVWERPLSGDAWAVAIINRQEIGGPRSYTIPVASLGKGVACNPACFITQLLPVKRKLGFYEATSRLRSHINPTGTVLLQLENTMQFSLKDLL

SEQ ID NO: 1647 - DNA, 1194 bp, Artificial Sequence
  variant of human alpha-galactosidase A
ctggataatggattggctagaacacctcctatggggtggcttcactgggagaggttcatgtgcaacctggactgtcaggaagaaccagacagctgcatctccgagaagctctttgaggaaatggccgaacgaatggtgactgagggctggaaagatgcaggttacgagtatctgtgtattgacgattgctggatggccccacaacgggattctgagggaagacttcaggctgatccgcagcgcttccctcatggcataaggcagctggcaaaccacgtccacagtaaggggctcaaattgggaatctacgcggacgtgggcaataagacctgtgccggttttccgggatcattcgggtattatgacattgacgcccaaacgtttgctgattggggcgttgacctgctgaaattcgatggttgctactgtgacagcctcgaaaacctggcagacggctacaagcatatgtctctcgccctgaatagaaccggtcggccaatcgtatattcctgcgagtggcctctttacatgtggccatttcagaaaccgaactacacagaaattcgccagtattgcaatcattggaggaacttcgctgatatcgatgactcatgggcctccataaagagcatcttggactggaccagtcggaatcaggagcgaattgtggatgtcgcaggccctggaggatggaacgatccagacatgctggtgatcggcaattttggcctctcttgggaccagcaggttacccaaatggctctgtgggcaattatggccggtcctcttttcatgagcaacgatctgcgcgcgatctcaccacaggcaaaggccctgctccaagacaaagatgtgatagccatcaatcaggacccgttgggaaagcagggctaccagctgagaaaaggcgacaactttgaggtctgggaaaggcctttgagtggagatgcgtgggctgtggccattattaatcggcaagagatcggaggtccacgctcctatacaattcctgtagcatctcttggcaagggcgttgcctgtaacccagcttgcttcatcactcagcttctgccggtgaagagaaaactgggtttctacgaagctaccagcaggctccgatcccacatcaaccctacaggaaccgtcctcttgcagctggagaatacgatgcagggttcactgaaggacctcctg

SEQ ID NO: 1648 - protein, 398 aa, Artificial Sequence
  variant of human alpha-galactosidase A
LDNGLARTPPMGWLHWERFMCNLDCQEEPDSCISEKLFEEMAERMVTEGWKDAGYEYLCIDDCWMAPQRDSEGRLQADPQRFPHGIRQLANHVHSKGLKLGIYADVGNKTCAGFPGSFGYYDIDAQTFADWGVDLLKFDGCYCDSLENLADGYKHMSLALNRTGRPIVYSCEWPLYMWPFQKPNYTEIRQYCNHWRNFADIDDSWASIKSILDWTSRNQERIVDVAGPGGWNDPDMLVIGNFGLSWDQQVTQMALWAIMAGPLFMSNDLRAISPQAKALLQDKDVIAINQDPLGKQGYQLRKGDNFEVWERPLSGDAWAVAIINRQEIGGPRSYTIPVASLGKGVACNPACFITQLLPVKRKLGFYEATSRLRSHINPTGTVLLQLENTMQGSLKDLL

SEQ ID NO: 1649 - DNA, 1194 bp, Artificial Sequence
  variant of human alpha-galactosidase A
ctggataatggattggctagaacacctcctatggggtggcttcactgggagaggttcatgtgcaacctggactgtcaggaagaaccagacagctgcatctccgagaagctctttgaggaaatggccgaacgaatggtgactgagggctggaaagatgcaggttacgagtatctgtgtattgacgattgctggatggccccacaacgggattctgagggaagacttcaggctgatccgcagcgcttccctcatggcataaggcagctggcaaaccacgtccacagtaaggggctcaaattgggaatctacgcggacgtgggcaataagacctgtgccggttttccgggatcattcgggtattatgacattgacgcccaaacgtttgctgattggggcgttgacctgctgaaattcgatggttgctactgtgacagcctcgaaaacctggcagacggctacaagcatatgtctctcgccctgaatagaaccggtcggccaatcgtatattcctgcgagtggcctctttacatgtggccatttcagaaaccgaactacacagaaattcgccagtattgcaatcattggaggaacttcgctgatatcgatgactcatgggcctccataaagagcatcttggactggaccagtcggaatcaggagcgaattgtggatgtcgcaggccctggaggatggaacgatccagacatgctggtgatcggcaattttggcctctcttgggaccagcaggttacccaaatggctctgtgggcaattatggccggtcctcttttcatgagcaacgatctgcgcgcgatctcaccacaggcaaaggccctgctccaagacaaagatgtgatagccatcaatcaggacccgttgggaaagcagggctaccagctgagaaaaggcgacaactttgaggtctgggaaaggcctttgagtggagatgcgtgggctgtggccattattaatcggcaagagatcggaggtccacgctcctatacaattcctgtagcatctcttggcaagggcgttgcctgtaacccagcttgcttcatcactcagcttctgccggtgaagagaaaactgggtttctacgaagctaccagcaggctccgatcccacatcaaccctacaggaaccgtcctcttgcagctggagaatacgatgcagcattcactgaaggacctcctg

SEQ ID NO: 1650 - protein, 398 aa, Artificial Sequence
  variant of human alpha-galactosidase A
LDNGLARTPPMGWLHWERFMCNLDCQEEPDSCISEKLFEEMAERMVTEGWKDAGYEYLCIDDCWMAPQRDSEGRLQADPQRFPHGIRQLANHVHSKGLKLGIYADVGNKTCAGFPGSFGYYDIDAQTFADWGVDLLKFDGCYCDSLENLADGYKHMSLALNRTGRPIVYSCEWPLYMWPFQKPNYTEIRQYCNHWRNFADIDDSWASIKSILDWTSRNQERIVDVAGPGGWNDPDMLVIGNFGLSWDQQVTQMALWAIMAGPLFMSNDLRAISPQAKALLQDKDVIAINQDPLGKQGYQLRKGDNFEVWERPLSGDAWAVAIINRQEIGGPRSYTIPVASLGKGVACNPACFITQLLPVKRKLGFYEATSRLRSHINPTGTVLLQLENTMQHSLKDLL

SEQ ID NO: 1651 - DNA, 1194 bp, Artificial Sequence
  variant of human alpha-galactosidase A
ctggataatggattggctagaacacctcctatggggtggcttcactgggagaggttcatgtgcaacctggactgtcaggaagaaccagacagctgcatctccgagaagctctttgaggaaatggccgaacgaatggtgactgagggctggaaagatgcaggttacgagtatctgtgtattgacgattgctggatggccccacaacgggattctgagggaagacttcaggctgatccgcagcgcttccctcatggcataaggcagctggcaaaccacgtccacagtaaggggctcaaattgggaatctacgcggacgtgggcaataagacctgtgccggttttccgggatcattcgggtattatgacattgacgcccaaacgtttgctgattggggcgttgacctgctgaaattcgatggttgctactgtgacagcctcgaaaacctggcagacggctacaagcatatgtctctcgccctgaatagaaccggtcggccaatcgtatattcctgcgagtggcctctttacatgtggccatttcagaaaccgaactacacagaaattcgccagtattgcaatcattggaggaacttcgctgatatcgatgactcatgggcctccataaagagcatcttggactggaccagtcggaatcaggagcgaattgtggatgtcgcaggccctggaggatggaacgatccagacatgctggtgatcggcaattttggcctctcttgggaccagcaggttacccaaatggctctgtgggcaattatggccggtcctcttttcatgagcaacgatctgcgcgcgatctcaccacaggcaaaggccctgctccaagacaaagatgtgatagccatcaatcaggacccgttgggaaagcagggctaccagctgagaaaaggcgacaactttgaggtctgggaaaggcctttgagtggagatgcgtgggctgtggccattattaatcggcaagagatcggaggtccacgctcctatacaattcctgtagcatctcttggcaagggcgttgcctgtaacccagcttgcttcatcactcagcttctgccggtgaagagaaaactgggtttctacgaagctaccagcaggctccgatcccacatcaaccctacaggaaccgtcctcttgcagctggagaatacgatgcagatttcactgaaggacctcctg

SEQ ID NO: 1652 - protein, 398 aa, Artificial Sequence
  variant of human alpha-galactosidase A
LDNGLARTPPMGWLHWERFMCNLDCQEEPDSCISEKLFEEMAERMVTEGWKDAGYEYLCIDDCWMAPQRDSEGRLQADPQRFPHGIRQLANHVHSKGLKLGIYADVGNKTCAGFPGSFGYYDIDAQTFADWGVDLLKFDGCYCDSLENLADGYKHMSLALNRTGRPIVYSCEWPLYMWPFQKPNYTEIRQYCNHWRNFADIDDSWASIKSILDWTSRNQERIVDVAGPGGWNDPDMLVIGNFGLSWDQQVTQMALWAIMAGPLFMSNDLRAISPQAKALLQDKDVIAINQDPLGKQGYQLRKGDNFEVWERPLSGDAWAVAIINRQEIGGPRSYTIPVASLGKGVACNPACFITQLLPVKRKLGFYEATSRLRSHINPTGTVLLQLENTMQISLKDLL

SEQ ID NO: 1653 - DNA, 1194 bp, Artificial Sequence
  variant of human alpha-galactosidase A
ctggataatggattggctagaacacctcctatggggtggcttcactgggagaggttcatgtgcaacctggactgtcaggaagaaccagacagctgcatctccgagaagctctttgaggaaatggccgaacgaatggtgactgagggctggaaagatgcaggttacgagtatctgtgtattgacgattgctggatggccccacaacgggattctgagggaagacttcaggctgatccgcagcgcttccctcatggcataaggcagctggcaaaccacgtccacagtaaggggctcaaattgggaatctacgcggacgtgggcaataagacctgtgccggttttccgggatcattcgggtattatgacattgacgcccaaacgtttgctgattggggcgttgacctgctgaaattcgatggttgctactgtgacagcctcgaaaacctggcagacggctacaagcatatgtctctcgccctgaatagaaccggtcggccaatcgtatattcctgcgagtggcctctttacatgtggccatttcagaaaccgaactacacagaaattcgccagtattgcaatcattggaggaacttcgctgatatcgatgactcatgggcctccataaagagcatcttggactggaccagtcggaatcaggagcgaattgtggatgtcgcaggccctggaggatggaacgatccagacatgctggtgatcggcaattttggcctctcttgggaccagcaggttacccaaatggctctgtgggcaattatggccggtcctcttttcatgagcaacgatctgcgcgcgatctcaccacaggcaaaggccctgctccaagacaaagatgtgatagccatcaatcaggacccgttgggaaagcagggctaccagctgagaaaaggcgacaactttgaggtctgggaaaggcctttgagtggagatgcgtgggctgtggccattattaatcggcaagagatcggaggtccacgctcctatacaattcctgtagcatctcttggcaagggcgttgcctgtaacccagcttgcttcatcactcagcttctgccggtgaagagaaaactgggtttctacgaagctaccagcaggctccgatcccacatcaaccctacaggaaccgtcctcttgcagctggagaatacgatgcagaagtcactgaaggacctcctg

SEQ ID NO: 1654 - protein, 398 aa, Artificial Sequence
  variant of human alpha-galactosidase A
LDNGLARTPPMGWLHWERFMCNLDCQEEPDSCISEKLFEEMAERMVTEGWKDAGYEYLCIDDCWMAPQRDSEGRLQADPQRFPHGIRQLANHVHSKGLKLGIYADVGNKTCAGFPGSFGYYDIDAQTFADWGVDLLKFDGCYCDSLENLADGYKHMSLALNRTGRPIVYSCEWPLYMWPFQKPNYTEIRQYCNHWRNFADIDDSWASIKSILDWTSRNQERIVDVAGPGGWNDPDMLVIGNFGLSWDQQVTQMALWAIMAGPLFMSNDLRAISPQAKALLQDKDVIAINQDPLGKQGYQLRKGDNFEVWERPLSGDAWAVAIINRQEIGGPRSYTIPVASLGKGVACNPACFITQLLPVKRKLGFYEATSRLRSHINPTGTVLLQLENTMQKSLKDLL

SEQ ID NO: 1655 - DNA, 1194 bp, Artificial Sequence
  variant of human alpha-galactosidase A
ctggataatggattggctagaacacctcctatggggtggcttcactgggagaggttcatgtgcaacctggactgtcaggaagaaccagacagctgcatctccgagaagctctttgaggaaatggccgaacgaatggtgactgagggctggaaagatgcaggttacgagtatctgtgtattgacgattgctggatggccccacaacgggattctgagggaagacttcaggctgatccgcagcgcttccctcatggcataaggcagctggcaaaccacgtccacagtaaggggctcaaattgggaatctacgcggacgtgggcaataagacctgtgccggttttccgggatcattcgggtattatgacattgacgcccaaacgtttgctgattggggcgttgacctgctgaaattcgatggttgctactgtgacagcctcgaaaacctggcagacggctacaagcatatgtctctcgccctgaatagaaccggtcggccaatcgtatattcctgcgagtggcctctttacatgtggccatttcagaaaccgaactacacagaaattcgccagtattgcaatcattggaggaacttcgctgatatcgatgactcatgggcctccataaagagcatcttggactggaccagtcggaatcaggagcgaattgtggatgtcgcaggccctggaggatggaacgatccagacatgctggtgatcggcaattttggcctctcttgggaccagcaggttacccaaatggctctgtgggcaattatggccggtcctcttttcatgagcaacgatctgcgcgcgatctcaccacaggcaaaggccctgctccaagacaaagatgtgatagccatcaatcaggacccgttgggaaagcagggctaccagctgagaaaaggcgacaactttgaggtctgggaaaggcctttgagtggagatgcgtgggctgtggccattattaatcggcaagagatcggaggtccacgctcctatacaattcctgtagcatctcttggcaagggcgttgcctgtaacccagcttgcttcatcactcagcttctgccggtgaagagaaaactgggtttctacgaagctaccagcaggctccgatcccacatcaaccctacaggaaccgtcctcttgcagctggagaatacgatgcagctgtcactgaaggacctcctg

SEQ ID NO: 1656 - protein, 398 aa, Artificial Sequence
  variant of human alpha-galactosidase A
LDNGLARTPPMGWLHWERFMCNLDCQEEPDSCISEKLFEEMAERMVTEGWKDAGYEYLCIDDCWMAPQRDSEGRLQADPQRFPHGIRQLANHVHSKGLKLGIYADVGNKTCAGFPGSFGYYDIDAQTFADWGVDLLKFDGCYCDSLENLADGYKHMSLALNRTGRPIVYSCEWPLYMWPFQKPNYTEIRQYCNHWRNFADIDDSWASIKSILDWTSRNQERIVDVAGPGGWNDPDMLVIGNFGLSWDQQVTQMALWAIMAGPLFMSNDLRAISPQAKALLQDKDVIAINQDPLGKQGYQLRKGDNFEVWERPLSGDAWAVAIINRQEIGGPRSYTIPVASLGKGVACNPACFITQLLPVKRKLGFYEATSRLRSHINPTGTVLLQLENTMQLSLKDLL

SEQ ID NO: 1657 - DNA, 1194 bp, Artificial Sequence
  variant of human alpha-galactosidase A
ctggataatggattggctagaacacctcctatggggtggcttcactgggagaggttcatgtgcaacctggactgtcaggaagaaccagacagctgcatctccgagaagctctttgaggaaatggccgaacgaatggtgactgagggctggaaagatgcaggttacgagtatctgtgtattgacgattgctggatggccccacaacgggattctgagggaagacttcaggctgatccgcagcgcttccctcatggcataaggcagctggcaaaccacgtccacagtaaggggctcaaattgggaatctacgcggacgtgggcaataagacctgtgccggttttccgggatcattcgggtattatgacattgacgcccaaacgtttgctgattggggcgttgacctgctgaaattcgatggttgctactgtgacagcctcgaaaacctggcagacggctacaagcatatgtctctcgccctgaatagaaccggtcggccaatcgtatattcctgcgagtggcctctttacatgtggccatttcagaaaccgaactacacagaaattcgccagtattgcaatcattggaggaacttcgctgatatcgatgactcatgggcctccataaagagcatcttggactggaccagtcggaatcaggagcgaattgtggatgtcgcaggccctggaggatggaacgatccagacatgctggtgatcggcaattttggcctctcttgggaccagcaggttacccaaatggctctgtgggcaattatggccggtcctcttttcatgagcaacgatctgcgcgcgatctcaccacaggcaaaggccctgctccaagacaaagatgtgatagccatcaatcaggacccgttgggaaagcagggctaccagctgagaaaaggcgacaactttgaggtctgggaaaggcctttgagtggagatgcgtgggctgtggccattattaatcggcaagagatcggaggtccacgctcctatacaattcctgtagcatctcttggcaagggcgttgcctgtaacccagcttgcttcatcactcagcttctgccggtgaagagaaaactgggtttctacgaagctaccagcaggctccgatcccacatcaaccctacaggaaccgtcctcttgcagctggagaatacgatgcagatgtcactgaaggacctcctg

SEQ ID NO: 1658 - protein, 398 aa, Artificial Sequence
  variant of human alpha-galactosidase A
LDNGLARTPPMGWLHWERFMCNLDCQEEPDSCISEKLFEEMAERMVTEGWKDAGYEYLCIDDCWMAPQRDSEGRLQADPQRFPHGIRQLANHVHSKGLKLGIYADVGNKTCAGFPGSFGYYDIDAQTFADWGVDLLKFDGCYCDSLENLADGYKHMSLALNRTGRPIVYSCEWPLYMWPFQKPNYTEIRQYCNHWRNFADIDDSWASIKSILDWTSRNQERIVDVAGPGGWNDPDMLVIGNFGLSWDQQVTQMALWAIMAGPLFMSNDLRAISPQAKALLQDKDVIAINQDPLGKQGYQLRKGDNFEVWERPLSGDAWAVAIINRQEIGGPRSYTIPVASLGKGVACNPACFITQLLPVKRKLGFYEATSRLRSHINPTGTVLLQLENTMQMSLKDLL

SEQ ID NO: 1659 - DNA, 1194 bp, Artificial Sequence
  variant of human alpha-galactosidase A
ctggataatggattggctagaacacctcctatggggtggcttcactgggagaggttcatgtgcaacctggactgtcaggaagaaccagacagctgcatctccgagaagctctttgaggaaatggccgaacgaatggtgactgagggctggaaagatgcaggttacgagtatctgtgtattgacgattgctggatggccccacaacgggattctgagggaagacttcaggctgatccgcagcgcttccctcatggcataaggcagctggcaaaccacgtccacagtaaggggctcaaattgggaatctacgcggacgtgggcaataagacctgtgccggttttccgggatcattcgggtattatgacattgacgcccaaacgtttgctgattggggcgttgacctgctgaaattcgatggttgctactgtgacagcctcgaaaacctggcagacggctacaagcatatgtctctcgccctgaatagaaccggtcggccaatcgtatattcctgcgagtggcctctttacatgtggccatttcagaaaccgaactacacagaaattcgccagtattgcaatcattggaggaacttcgctgatatcgatgactcatgggcctccataaagagcatcttggactggaccagtcggaatcaggagcgaattgtggatgtcgcaggccctggaggatggaacgatccagacatgctggtgatcggcaattttggcctctcttgggaccagcaggttacccaaatggctctgtgggcaattatggccggtcctcttttcatgagcaacgatctgcgcgcgatctcaccacaggcaaaggccctgctccaagacaaagatgtgatagccatcaatcaggacccgttgggaaagcagggctaccagctgagaaaaggcgacaactttgaggtctgggaaaggcctttgagtggagatgcgtgggctgtggccattattaatcggcaagagatcggaggtccacgctcctatacaattcctgtagcatctcttggcaagggcgttgcctgtaacccagcttgcttcatcactcagcttctgccggtgaagagaaaactgggtttctacgaagctaccagcaggctccgatcccacatcaaccctacaggaaccgtcctcttgcagctggagaatacgatgcagaattcactgaaggacctcctg

SEQ ID NO: 1660 - protein, 398 aa, Artificial Sequence
  variant of human alpha-galactosidase A
LDNGLARTPPMGWLHWERFMCNLDCQEEPDSCISEKLFEEMAERMVTEGWKDAGYEYLCIDDCWMAPQRDSEGRLQADPQRFPHGIRQLANHVHSKGLKLGIYADVGNKTCAGFPGSFGYYDIDAQTFADWGVDLLKFDGCYCDSLENLADGYKHMSLALNRTGRPIVYSCEWPLYMWPFQKPNYTEIRQYCNHWRNFADIDDSWASIKSILDWTSRNQERIVDVAGPGGWNDPDMLVIGNFGLSWDQQVTQMALWAIMAGPLFMSNDLRAISPQAKALLQDKDVIAINQDPLGKQGYQLRKGDNFEVWERPLSGDAWAVAIINRQEIGGPRSYTIPVASLGKGVACNPACFITQLLPVKRKLGFYEATSRLRSHINPTGTVLLQLENTMQNSLKDLL

SEQ ID NO: 1661 - DNA, 1194 bp, Artificial Sequence
  variant of human alpha-galactosidase A
ctggataatggattggctagaacacctcctatggggtggcttcactgggagaggttcatgtgcaacctggactgtcaggaagaaccagacagctgcatctccgagaagctctttgaggaaatggccgaacgaatggtgactgagggctggaaagatgcaggttacgagtatctgtgtattgacgattgctggatggccccacaacgggattctgagggaagacttcaggctgatccgcagcgcttccctcatggcataaggcagctggcaaaccacgtccacagtaaggggctcaaattgggaatctacgcggacgtgggcaataagacctgtgccggttttccgggatcattcgggtattatgacattgacgcccaaacgtttgctgattggggcgttgacctgctgaaattcgatggttgctactgtgacagcctcgaaaacctggcagacggctacaagcatatgtctctcgccctgaatagaaccggtcggccaatcgtatattcctgcgagtggcctctttacatgtggccatttcagaaaccgaactacacagaaattcgccagtattgcaatcattggaggaacttcgctgatatcgatgactcatgggcctccataaagagcatcttggactggaccagtcggaatcaggagcgaattgtggatgtcgcaggccctggaggatggaacgatccagacatgctggtgatcggcaattttggcctctcttgggaccagcaggttacccaaatggctctgtgggcaattatggccggtcctcttttcatgagcaacgatctgcgcgcgatctcaccacaggcaaaggccctgctccaagacaaagatgtgatagccatcaatcaggacccgttgggaaagcagggctaccagctgagaaaaggcgacaactttgaggtctgggaaaggcctttgagtggagatgcgtgggctgtggccattattaatcggcaagagatcggaggtccacgctcctatacaattcctgtagcatctcttggcaagggcgttgcctgtaacccagcttgcttcatcactcagcttctgccggtgaagagaaaactgggtttctacgaagctaccagcaggctccgatcccacatcaaccctacaggaaccgtcctcttgcagctggagaatacgatgcagccttcactgaaggacctcctg

SEQ ID NO: 1662 - protein, 398 aa, Artificial Sequence
  variant of human alpha-galactosidase A
LDNGLARTPPMGWLHWERFMCNLDCQEEPDSCISEKLFEEMAERMVTEGWKDAGYEYLCIDDCWMAPQRDSEGRLQADPQRFPHGIRQLANHVHSKGLKLGIYADVGNKTCAGFPGSFGYYDIDAQTFADWGVDLLKFDGCYCDSLENLADGYKHMSLALNRTGRPIVYSCEWPLYMWPFQKPNYTEIRQYCNHWRNFADIDDSWASIKSILDWTSRNQERIVDVAGPGGWNDPDMLVIGNFGLSWDQQVTQMALWAIMAGPLFMSNDLRAISPQAKALLQDKDVIAINQDPLGKQGYQLRKGDNFEVWERPLSGDAWAVAIINRQEIGGPRSYTIPVASLGKGVACNPACFITQLLPVKRKLGFYEATSRLRSHINPTGTVLLQLENTMQPSLKDLL

SEQ ID NO: 1663 - DNA, 1194 bp, Artificial Sequence
  variant of human alpha-galactosidase A
ctggataatggattggctagaacacctcctatggggtggcttcactgggagaggttcatgtgcaacctggactgtcaggaagaaccagacagctgcatctccgagaagctctttgaggaaatggccgaacgaatggtgactgagggctggaaagatgcaggttacgagtatctgtgtattgacgattgctggatggccccacaacgggattctgagggaagacttcaggctgatccgcagcgcttccctcatggcataaggcagctggcaaaccacgtccacagtaaggggctcaaattgggaatctacgcggacgtgggcaataagacctgtgccggttttccgggatcattcgggtattatgacattgacgcccaaacgtttgctgattggggcgttgacctgctgaaattcgatggttgctactgtgacagcctcgaaaacctggcagacggctacaagcatatgtctctcgccctgaatagaaccggtcggccaatcgtatattcctgcgagtggcctctttacatgtggccatttcagaaaccgaactacacagaaattcgccagtattgcaatcattggaggaacttcgctgatatcgatgactcatgggcctccataaagagcatcttggactggaccagtcggaatcaggagcgaattgtggatgtcgcaggccctggaggatggaacgatccagacatgctggtgatcggcaattttggcctctcttgggaccagcaggttacccaaatggctctgtgggcaattatggccggtcctcttttcatgagcaacgatctgcgcgcgatctcaccacaggcaaaggccctgctccaagacaaagatgtgatagccatcaatcaggacccgttgggaaagcagggctaccagctgagaaaaggcgacaactttgaggtctgggaaaggcctttgagtggagatgcgtgggctgtggccattattaatcggcaagagatcggaggtccacgctcctatacaattcctgtagcatctcttggcaagggcgttgcctgtaacccagcttgcttcatcactcagcttctgccggtgaagagaaaactgggtttctacgaagctaccagcaggctccgatcccacatcaaccctacaggaaccgtcctcttgcagctggagaatacgatgcagcagtcactgaaggacctcctg

SEQ ID NO: 1664 - protein, 398 aa, Artificial Sequence
  variant of human alpha-galactosidase A
LDNGLARTPPMGWLHWERFMCNLDCQEEPDSCISEKLFEEMAERMVTEGWKDAGYEYLCIDDCWMAPQRDSEGRLQADPQRFPHGIRQLANHVHSKGLKLGIYADVGNKTCAGFPGSFGYYDIDAQTFADWGVDLLKFDGCYCDSLENLADGYKHMSLALNRTGRPIVYSCEWPLYMWPFQKPNYTEIRQYCNHWRNFADIDDSWASIKSILDWTSRNQERIVDVAGPGGWNDPDMLVIGNFGLSWDQQVTQMALWAIMAGPLFMSNDLRAISPQAKALLQDKDVIAINQDPLGKQGYQLRKGDNFEVWERPLSGDAWAVAIINRQEIGGPRSYTIPVASLGKGVACNPACFITQLLPVKRKLGFYEATSRLRSHINPTGTVLLQLENTMQQSLKDLL

SEQ ID NO: 1665 - DNA, 1194 bp, Artificial Sequence
  variant of human alpha-galactosidase A
ctggataatggattggctagaacacctcctatggggtggcttcactgggagaggttcatgtgcaacctggactgtcaggaagaaccagacagctgcatctccgagaagctctttgaggaaatggccgaacgaatggtgactgagggctggaaagatgcaggttacgagtatctgtgtattgacgattgctggatggccccacaacgggattctgagggaagacttcaggctgatccgcagcgcttccctcatggcataaggcagctggcaaaccacgtccacagtaaggggctcaaattgggaatctacgcggacgtgggcaataagacctgtgccggttttccgggatcattcgggtattatgacattgacgcccaaacgtttgctgattggggcgttgacctgctgaaattcgatggttgctactgtgacagcctcgaaaacctggcagacggctacaagcatatgtctctcgccctgaatagaaccggtcggccaatcgtatattcctgcgagtggcctctttacatgtggccatttcagaaaccgaactacacagaaattcgccagtattgcaatcattggaggaacttcgctgatatcgatgactcatgggcctccataaagagcatcttggactggaccagtcggaatcaggagcgaattgtggatgtcgcaggccctggaggatggaacgatccagacatgctggtgatcggcaattttggcctctcttgggaccagcaggttacccaaatggctctgtgggcaattatggccggtcctcttttcatgagcaacgatctgcgcgcgatctcaccacaggcaaaggccctgctccaagacaaagatgtgatagccatcaatcaggacccgttgggaaagcagggctaccagctgagaaaaggcgacaactttgaggtctgggaaaggcctttgagtggagatgcgtgggctgtggccattattaatcggcaagagatcggaggtccacgctcctatacaattcctgtagcatctcttggcaagggcgttgcctgtaacccagcttgcttcatcactcagcttctgccggtgaagagaaaactgggtttctacgaagctaccagcaggctccgatcccacatcaaccctacaggaaccgtcctcttgcagctggagaatacgatgcagcgttcactgaaggacctcctg

SEQ ID NO: 1666 - protein, 398 aa, Artificial Sequence
  variant of human alpha-galactosidase A
LDNGLARTPPMGWLHWERFMCNLDCQEEPDSCISEKLFEEMAERMVTEGWKDAGYEYLCIDDCWMAPQRDSEGRLQADPQRFPHGIRQLANHVHSKGLKLGIYADVGNKTCAGFPGSFGYYDIDAQTFADWGVDLLKFDGCYCDSLENLADGYKHMSLALNRTGRPIVYSCEWPLYMWPFQKPNYTEIRQYCNHWRNFADIDDSWASIKSILDWTSRNQERIVDVAGPGGWNDPDMLVIGNFGLSWDQQVTQMALWAIMAGPLFMSNDLRAISPQAKALLQDKDVIAINQDPLGKQGYQLRKGDNFEVWERPLSGDAWAVAIINRQEIGGPRSYTIPVASLGKGVACNPACFITQLLPVKRKLGFYEATSRLRSHINPTGTVLLQLENTMQRSLKDLL

SEQ ID NO: 1667 - DNA, 1194 bp, Artificial Sequence
  variant of human alpha-galactosidase A
ctggataatggattggctagaacacctcctatggggtggcttcactgggagaggttcatgtgcaacctggactgtcaggaagaaccagacagctgcatctccgagaagctctttgaggaaatggccgaacgaatggtgactgagggctggaaagatgcaggttacgagtatctgtgtattgacgattgctggatggccccacaacgggattctgagggaagacttcaggctgatccgcagcgcttccctcatggcataaggcagctggcaaaccacgtccacagtaaggggctcaaattgggaatctacgcggacgtgggcaataagacctgtgccggttttccgggatcattcgggtattatgacattgacgcccaaacgtttgctgattggggcgttgacctgctgaaattcgatggttgctactgtgacagcctcgaaaacctggcagacggctacaagcatatgtctctcgccctgaatagaaccggtcggccaatcgtatattcctgcgagtggcctctttacatgtggccatttcagaaaccgaactacacagaaattcgccagtattgcaatcattggaggaacttcgctgatatcgatgactcatgggcctccataaagagcatcttggactggaccagtcggaatcaggagcgaattgtggatgtcgcaggccctggaggatggaacgatccagacatgctggtgatcggcaattttggcctctcttgggaccagcaggttacccaaatggctctgtgggcaattatggccggtcctcttttcatgagcaacgatctgcgcgcgatctcaccacaggcaaaggccctgctccaagacaaagatgtgatagccatcaatcaggacccgttgggaaagcagggctaccagctgagaaaaggcgacaactttgaggtctgggaaaggcctttgagtggagatgcgtgggctgtggccattattaatcggcaagagatcggaggtccacgctcctatacaattcctgtagcatctcttggcaagggcgttgcctgtaacccagcttgcttcatcactcagcttctgccggtgaagagaaaactgggtttctacgaagctaccagcaggctccgatcccacatcaaccctacaggaaccgtcctcttgcagctggagaatacgatgcagtcttcactgaaggacctcctg

SEQ ID NO: 1668 - protein, 398 aa, Artificial Sequence
  variant of human alpha-galactosidase A
LDNGLARTPPMGWLHWERFMCNLDCQEEPDSCISEKLFEEMAERMVTEGWKDAGYEYLCIDDCWMAPQRDSEGRLQADPQRFPHGIRQLANHVHSKGLKLGIYADVGNKTCAGFPGSFGYYDIDAQTFADWGVDLLKFDGCYCDSLENLADGYKHMSLALNRTGRPIVYSCEWPLYMWPFQKPNYTEIRQYCNHWRNFADIDDSWASIKSILDWTSRNQERIVDVAGPGGWNDPDMLVIGNFGLSWDQQVTQMALWAIMAGPLFMSNDLRAISPQAKALLQDKDVIAINQDPLGKQGYQLRKGDNFEVWERPLSGDAWAVAIINRQEIGGPRSYTIPVASLGKGVACNPACFITQLLPVKRKLGFYEATSRLRSHINPTGTVLLQLENTMQSSLKDLL

SEQ ID NO: 1669 - DNA, 1194 bp, Artificial Sequence
  variant of human alpha-galactosidase A
ctggataatggattggctagaacacctcctatggggtggcttcactgggagaggttcatgtgcaacctggactgtcaggaagaaccagacagctgcatctccgagaagctctttgaggaaatggccgaacgaatggtgactgagggctggaaagatgcaggttacgagtatctgtgtattgacgattgctggatggccccacaacgggattctgagggaagacttcaggctgatccgcagcgcttccctcatggcataaggcagctggcaaaccacgtccacagtaaggggctcaaattgggaatctacgcggacgtgggcaataagacctgtgccggttttccgggatcattcgggtattatgacattgacgcccaaacgtttgctgattggggcgttgacctgctgaaattcgatggttgctactgtgacagcctcgaaaacctggcagacggctacaagcatatgtctctcgccctgaatagaaccggtcggccaatcgtatattcctgcgagtggcctctttacatgtggccatttcagaaaccgaactacacagaaattcgccagtattgcaatcattggaggaacttcgctgatatcgatgactcatgggcctccataaagagcatcttggactggaccagtcggaatcaggagcgaattgtggatgtcgcaggccctggaggatggaacgatccagacatgctggtgatcggcaattttggcctctcttgggaccagcaggttacccaaatggctctgtgggcaattatggccggtcctcttttcatgagcaacgatctgcgcgcgatctcaccacaggcaaaggccctgctccaagacaaagatgtgatagccatcaatcaggacccgttgggaaagcagggctaccagctgagaaaaggcgacaactttgaggtctgggaaaggcctttgagtggagatgcgtgggctgtggccattattaatcggcaagagatcggaggtccacgctcctatacaattcctgtagcatctcttggcaagggcgttgcctgtaacccagcttgcttcatcactcagcttctgccggtgaagagaaaactgggtttctacgaagctaccagcaggctccgatcccacatcaaccctacaggaaccgtcctcttgcagctggagaatacgatgcaggtgtcactgaaggacctcctg

SEQ ID NO: 1670 - protein, 398 aa, Artificial Sequence
  variant of human alpha-galactosidase A
LDNGLARTPPMGWLHWERFMCNLDCQEEPDSCISEKLFEEMAERMVTEGWKDAGYEYLCIDDCWMAPQRDSEGRLQADPQRFPHGIRQLANHVHSKGLKLGIYADVGNKTCAGFPGSFGYYDIDAQTFADWGVDLLKFDGCYCDSLENLADGYKHMSLALNRTGRPIVYSCEWPLYMWPFQKPNYTEIRQYCNHWRNFADIDDSWASIKSILDWTSRNQERIVDVAGPGGWNDPDMLVIGNFGLSWDQQVTQMALWAIMAGPLFMSNDLRAISPQAKALLQDKDVIAINQDPLGKQGYQLRKGDNFEVWERPLSGDAWAVAIINRQEIGGPRSYTIPVASLGKGVACNPACFITQLLPVKRKLGFYEATSRLRSHINPTGTVLLQLENTMQVSLKDLL

SEQ ID NO: 1671 - DNA, 1194 bp, Artificial Sequence
  variant of human alpha-galactosidase A
ctggataatggattggctagaacacctcctatggggtggcttcactgggagaggttcatgtgcaacctggactgtcaggaagaaccagacagctgcatctccgagaagctctttgaggaaatggccgaacgaatggtgactgagggctggaaagatgcaggttacgagtatctgtgtattgacgattgctggatggccccacaacgggattctgagggaagacttcaggctgatccgcagcgcttccctcatggcataaggcagctggcaaaccacgtccacagtaaggggctcaaattgggaatctacgcggacgtgggcaataagacctgtgccggttttccgggatcattcgggtattatgacattgacgcccaaacgtttgctgattggggcgttgacctgctgaaattcgatggttgctactgtgacagcctcgaaaacctggcagacggctacaagcatatgtctctcgccctgaatagaaccggtcggccaatcgtatattcctgcgagtggcctctttacatgtggccatttcagaaaccgaactacacagaaattcgccagtattgcaatcattggaggaacttcgctgatatcgatgactcatgggcctccataaagagcatcttggactggaccagtcggaatcaggagcgaattgtggatgtcgcaggccctggaggatggaacgatccagacatgctggtgatcggcaattttggcctctcttgggaccagcaggttacccaaatggctctgtgggcaattatggccggtcctcttttcatgagcaacgatctgcgcgcgatctcaccacaggcaaaggccctgctccaagacaaagatgtgatagccatcaatcaggacccgttgggaaagcagggctaccagctgagaaaaggcgacaactttgaggtctgggaaaggcctttgagtggagatgcgtgggctgtggccattattaatcggcaagagatcggaggtccacgctcctatacaattcctgtagcatctcttggcaagggcgttgcctgtaacccagcttgcttcatcactcagcttctgccggtgaagagaaaactgggtttctacgaagctaccagcaggctccgatcccacatcaaccctacaggaaccgtcctcttgcagctggagaatacgatgcagtggtcactgaaggacctcctg

SEQ ID NO: 1672 - protein, 398 aa, Artificial Sequence
  variant of human alpha-galactosidase A
LDNGLARTPPMGWLHWERFMCNLDCQEEPDSCISEKLFEEMAERMVTEGWKDAGYEYLCIDDCWMAPQRDSEGRLQADPQRFPHGIRQLANHVHSKGLKLGIYADVGNKTCAGFPGSFGYYDIDAQTFADWGVDLLKFDGCYCDSLENLADGYKHMSLALNRTGRPIVYSCEWPLYMWPFQKPNYTEIRQYCNHWRNFADIDDSWASIKSILDWTSRNQERIVDVAGPGGWNDPDMLVIGNFGLSWDQQVTQMALWAIMAGPLFMSNDLRAISPQAKALLQDKDVIAINQDPLGKQGYQLRKGDNFEVWERPLSGDAWAVAIINRQEIGGPRSYTIPVASLGKGVACNPACFITQLLPVKRKLGFYEATSRLRSHINPTGTVLLQLENTMQWSLKDLL

SEQ ID NO: 1673 - DNA, 1194 bp, Artificial Sequence
  variant of human alpha-galactosidase A
ctggataatggattggctagaacacctcctatggggtggcttcactgggagaggttcatgtgcaacctggactgtcaggaagaaccagacagctgcatctccgagaagctctttgaggaaatggccgaacgaatggtgactgagggctggaaagatgcaggttacgagtatctgtgtattgacgattgctggatggccccacaacgggattctgagggaagacttcaggctgatccgcagcgcttccctcatggcataaggcagctggcaaaccacgtccacagtaaggggctcaaattgggaatctacgcggacgtgggcaataagacctgtgccggttttccgggatcattcgggtattatgacattgacgcccaaacgtttgctgattggggcgttgacctgctgaaattcgatggttgctactgtgacagcctcgaaaacctggcagacggctacaagcatatgtctctcgccctgaatagaaccggtcggccaatcgtatattcctgcgagtggcctctttacatgtggccatttcagaaaccgaactacacagaaattcgccagtattgcaatcattggaggaacttcgctgatatcgatgactcatgggcctccataaagagcatcttggactggaccagtcggaatcaggagcgaattgtggatgtcgcaggccctggaggatggaacgatccagacatgctggtgatcggcaattttggcctctcttgggaccagcaggttacccaaatggctctgtgggcaattatggccggtcctcttttcatgagcaacgatctgcgcgcgatctcaccacaggcaaaggccctgctccaagacaaagatgtgatagccatcaatcaggacccgttgggaaagcagggctaccagctgagaaaaggcgacaactttgaggtctgggaaaggcctttgagtggagatgcgtgggctgtggccattattaatcggcaagagatcggaggtccacgctcctatacaattcctgtagcatctcttggcaagggcgttgcctgtaacccagcttgcttcatcactcagcttctgccggtgaagagaaaactgggtttctacgaagctaccagcaggctccgatcccacatcaaccctacaggaaccgtcctcttgcagctggagaatacgatgcagtattcactgaaggacctcctg

SEQ ID NO: 1674 - protein, 398 aa, Artificial Sequence
  variant of human alpha-galactosidase A
LDNGLARTPPMGWLHWERFMCNLDCQEEPDSCISEKLFEEMAERMVTEGWKDAGYEYLCIDDCWMAPQRDSEGRLQADPQRFPHGIRQLANHVHSKGLKLGIYADVGNKTCAGFPGSFGYYDIDAQTFADWGVDLLKFDGCYCDSLENLADGYKHMSLALNRTGRPIVYSCEWPLYMWPFQKPNYTEIRQYCNHWRNFADIDDSWASIKSILDWTSRNQERIVDVAGPGGWNDPDMLVIGNFGLSWDQQVTQMALWAIMAGPLFMSNDLRAISPQAKALLQDKDVIAINQDPLGKQGYQLRKGDNFEVWERPLSGDAWAVAIINRQEIGGPRSYTIPVASLGKGVACNPACFITQLLPVKRKLGFYEATSRLRSHINPTGTVLLQLENTMQYSLKDLL

SEQ ID NO: 1675 - DNA, 1194 bp, Artificial Sequence
  variant of human alpha-galactosidase A
ctggataatggattggctagaacacctcctatggggtggcttcactgggagaggttcatgtgcaacctggactgtcaggaagaaccagacagctgcatctccgagaagctctttgaggaaatggccgaacgaatggtggctgagggctggaaagatgcaggttacgagtatctgtgtattgacgattgctggatggccccacaacgggattctgagggaagacttcaggctgatccgcagcgcttccctcatggcataaggcagctggcaaaccacgtccacagtaaggggctcaaattgggaatctacgcggacgtgggcaataagacctgtgccggttttccgggatcattcgggtattatgacattgacgcccaaacgtttgctgattggggcgttgacctgctgaaattcgatggttgctactgtgacagcctcgaaaacctggcagacggctacaagcatatgtctctcgccctgaatagaaccggtcggccaatcgtatattcctgcgagtggcctctttacatgtggccatttcagaaaccgaactacacagaaattcgccagtattgcaatcattggaggaacttcgctgatatcgatgactcatgggcctccataaagagcatcttggactggaccagtcggaatcaggagcgaattgtggatgtcgcaggccctggaggatggaacgatccagacatgctggtgatcggcaattttggcctctcttgggaccagcaggttacccaaatggctctgtgggcaattatggccggtcctcttttcatgagcaacgatctgcgcgcgatctcaccacaggcaaaggccctgctccaagacaaagatgtgatagccatcaatcaggacccgttgggaaagcagggctaccagctgagaaaaggcgacaactttgaggtctgggaaaggcctttgagtggagatgcgtgggctgtggccattattaatcggcaagagatcggaggtccacgctcctatacaattcctgtagcatctcttggcaagggcgttgcctgtaacccagcttgcttcatcactcagcttctgccggtgaagagaaaactgggtttctacgaagctaccagcaggctccgatcccacatcaaccctacaggaaccgtcctcttgcagctggagaatacgatgcagacttcactgaaggacctcctg

SEQ ID NO: 1676 - protein, 398 aa, Artificial Sequence
  variant of human alpha-galactosidase A
LDNGLARTPPMGWLHWERFMCNLDCQEEPDSCISEKLFEEMAERMVAEGWKDAGYEYLCIDDCWMAPQRDSEGRLQADPQRFPHGIRQLANHVHSKGLKLGIYADVGNKTCAGFPGSFGYYDIDAQTFADWGVDLLKFDGCYCDSLENLADGYKHMSLALNRTGRPIVYSCEWPLYMWPFQKPNYTEIRQYCNHWRNFADIDDSWASIKSILDWTSRNQERIVDVAGPGGWNDPDMLVIGNFGLSWDQQVTQMALWAIMAGPLFMSNDLRAISPQAKALLQDKDVIAINQDPLGKQGYQLRKGDNFEVWERPLSGDAWAVAIINRQEIGGPRSYTIPVASLGKGVACNPACFITQLLPVKRKLGFYEATSRLRSHINPTGTVLLQLENTMQTSLKDLL

SEQ ID NO: 1677 - DNA, 1194 bp, Artificial Sequence
  variant of human alpha-galactosidase A
ctggataatggattggctagaacacctcctatggggtggcttcactgggagaggttcatgtgcaacctggactgtcaggaagaaccagacagctgcatctccgagaagctctttgaggaaatggccgaacgaatggtgtgtgagggctggaaagatgcaggttacgagtatctgtgtattgacgattgctggatggccccacaacgggattctgagggaagacttcaggctgatccgcagcgcttccctcatggcataaggcagctggcaaaccacgtccacagtaaggggctcaaattgggaatctacgcggacgtgggcaataagacctgtgccggttttccgggatcattcgggtattatgacattgacgcccaaacgtttgctgattggggcgttgacctgctgaaattcgatggttgctactgtgacagcctcgaaaacctggcagacggctacaagcatatgtctctcgccctgaatagaaccggtcggccaatcgtatattcctgcgagtggcctctttacatgtggccatttcagaaaccgaactacacagaaattcgccagtattgcaatcattggaggaacttcgctgatatcgatgactcatgggcctccataaagagcatcttggactggaccagtcggaatcaggagcgaattgtggatgtcgcaggccctggaggatggaacgatccagacatgctggtgatcggcaattttggcctctcttgggaccagcaggttacccaaatggctctgtgggcaattatggccggtcctcttttcatgagcaacgatctgcgcgcgatctcaccacaggcaaaggccctgctccaagacaaagatgtgatagccatcaatcaggacccgttgggaaagcagggctaccagctgagaaaaggcgacaactttgaggtctgggaaaggcctttgagtggagatgcgtgggctgtggccattattaatcggcaagagatcggaggtccacgctcctatacaattcctgtagcatctcttggcaagggcgttgcctgtaacccagcttgcttcatcactcagcttctgccggtgaagagaaaactgggtttctacgaagctaccagcaggctccgatcccacatcaaccctacaggaaccgtcctcttgcagctggagaatacgatgcagacttcactgaaggacctcctg

SEQ ID NO: 1678 - protein, 398 aa, Artificial Sequence
  variant of human alpha-galactosidase A
LDNGLARTPPMGWLHWERFMCNLDCQEEPDSCISEKLFEEMAERMVCEGWKDAGYEYLCIDDCWMAPQRDSEGRLQADPQRFPHGIRQLANHVHSKGLKLGIYADVGNKTCAGFPGSFGYYDIDAQTFADWGVDLLKFDGCYCDSLENLADGYKHMSLALNRTGRPIVYSCEWPLYMWPFQKPNYTEIRQYCNHWRNFADIDDSWASIKSILDWTSRNQERIVDVAGPGGWNDPDMLVIGNFGLSWDQQVTQMALWAIMAGPLFMSNDLRAISPQAKALLQDKDVIAINQDPLGKQGYQLRKGDNFEVWERPLSGDAWAVAIINRQEIGGPRSYTIPVASLGKGVACNPACFITQLLPVKRKLGFYEATSRLRSHINPTGTVLLQLENTMQTSLKDLL

SEQ ID NO: 1679 - DNA, 1194 bp, Artificial Sequence
  variant of human alpha-galactosidase A
ctggataatggattggctagaacacctcctatggggtggcttcactgggagaggttcatgtgcaacctggactgtcaggaagaaccagacagctgcatctccgagaagctctttgaggaaatggccgaacgaatggtggatgagggctggaaagatgcaggttacgagtatctgtgtattgacgattgctggatggccccacaacgggattctgagggaagacttcaggctgatccgcagcgcttccctcatggcataaggcagctggcaaaccacgtccacagtaaggggctcaaattgggaatctacgcggacgtgggcaataagacctgtgccggttttccgggatcattcgggtattatgacattgacgcccaaacgtttgctgattggggcgttgacctgctgaaattcgatggttgctactgtgacagcctcgaaaacctggcagacggctacaagcatatgtctctcgccctgaatagaaccggtcggccaatcgtatattcctgcgagtggcctctttacatgtggccatttcagaaaccgaactacacagaaattcgccagtattgcaatcattggaggaacttcgctgatatcgatgactcatgggcctccataaagagcatcttggactggaccagtcggaatcaggagcgaattgtggatgtcgcaggccctggaggatggaacgatccagacatgctggtgatcggcaattttggcctctcttgggaccagcaggttacccaaatggctctgtgggcaattatggccggtcctcttttcatgagcaacgatctgcgcgcgatctcaccacaggcaaaggccctgctccaagacaaagatgtgatagccatcaatcaggacccgttgggaaagcagggctaccagctgagaaaaggcgacaactttgaggtctgggaaaggcctttgagtggagatgcgtgggctgtggccattattaatcggcaagagatcggaggtccacgctcctatacaattcctgtagcatctcttggcaagggcgttgcctgtaacccagcttgcttcatcactcagcttctgccggtgaagagaaaactgggtttctacgaagctaccagcaggctccgatcccacatcaaccctacaggaaccgtcctcttgcagctggagaatacgatgcagacttcactgaaggacctcctg

SEQ ID NO: 1680 - protein, 398 aa, Artificial Sequence; identical to SEQ ID NO: 174
  variant of human alpha-galactosidase A

SEQ ID NO: 1681 - DNA, 1194 bp, Artificial Sequence
  variant of human alpha-galactosidase A
ctggataatggattggctagaacacctcctatggggtggcttcactgggagaggttcatgtgcaacctggactgtcaggaagaaccagacagctgcatctccgagaagctctttgaggaaatggccgaacgaatggtggaggagggctggaaagatgcaggttacgagtatctgtgtattgacgattgctggatggccccacaacgggattctgagggaagacttcaggctgatccgcagcgcttccctcatggcataaggcagctggcaaaccacgtccacagtaaggggctcaaattgggaatctacgcggacgtgggcaataagacctgtgccggttttccgggatcattcgggtattatgacattgacgcccaaacgtttgctgattggggcgttgacctgctgaaattcgatggttgctactgtgacagcctcgaaaacctggcagacggctacaagcatatgtctctcgccctgaatagaaccggtcggccaatcgtatattcctgcgagtggcctctttacatgtggccatttcagaaaccgaactacacagaaattcgccagtattgcaatcattggaggaacttcgctgatatcgatgactcatgggcctccataaagagcatcttggactggaccagtcggaatcaggagcgaattgtggatgtcgcaggccctggaggatggaacgatccagacatgctggtgatcggcaattttggcctctcttgggaccagcaggttacccaaatggctctgtgggcaattatggccggtcctcttttcatgagcaacgatctgcgcgcgatctcaccacaggcaaaggccctgctccaagacaaagatgtgatagccatcaatcaggacccgttgggaaagcagggctaccagctgagaaaaggcgacaactttgaggtctgggaaaggcctttgagtggagatgcgtgggctgtggccattattaatcggcaagagatcggaggtccacgctcctatacaattcctgtagcatctcttggcaagggcgttgcctgtaacccagcttgcttcatcactcagcttctgccggtgaagagaaaactgggtttctacgaagctaccagcaggctccgatcccacatcaaccctacaggaaccgtcctcttgcagctggagaatacgatgcagacttcactgaaggacctcctg

SEQ ID NO: 1682 - protein, 398 aa, Artificial Sequence
  variant of human alpha-galactosidase A
LDNGLARTPPMGWLHWERFMCNLDCQEEPDSCISEKLFEEMAERMVEEGWKDAGYEYLCIDDCWMAPQRDSEGRLQADPQRFPHGIRQLANHVHSKGLKLGIYADVGNKTCAGFPGSFGYYDIDAQTFADWGVDLLKFDGCYCDSLENLADGYKHMSLALNRTGRPIVYSCEWPLYMWPFQKPNYTEIRQYCNHWRNFADIDDSWASIKSILDWTSRNQERIVDVAGPGGWNDPDMLVIGNFGLSWDQQVTQMALWAIMAGPLFMSNDLRAISPQAKALLQDKDVIAINQDPLGKQGYQLRKGDNFEVWERPLSGDAWAVAIINRQEIGGPRSYTIPVASLGKGVACNPACFITQLLPVKRKLGFYEATSRLRSHINPTGTVLLQLENTMQTSLKDLL

SEQ ID NO: 1683 - DNA, 1194 bp, Artificial Sequence
  variant of human alpha-galactosidase A
ctggataatggattggctagaacacctcctatggggtggcttcactgggagaggttcatgtgcaacctggactgtcaggaagaaccagacagctgcatctccgagaagctctttgaggaaatggccgaacgaatggtgtttgagggctggaaagatgcaggttacgagtatctgtgtattgacgattgctggatggccccacaacgggattctgagggaagacttcaggctgatccgcagcgcttccctcatggcataaggcagctggcaaaccacgtccacagtaaggggctcaaattgggaatctacgcggacgtgggcaataagacctgtgccggttttccgggatcattcgggtattatgacattgacgcccaaacgtttgctgattggggcgttgacctgctgaaattcgatggttgctactgtgacagcctcgaaaacctggcagacggctacaagcatatgtctctcgccctgaatagaaccggtcggccaatcgtatattcctgcgagtggcctctttacatgtggccatttcagaaaccgaactacacagaaattcgccagtattgcaatcattggaggaacttcgctgatatcgatgactcatgggcctccataaagagcatcttggactggaccagtcggaatcaggagcgaattgtggatgtcgcaggccctggaggatggaacgatccagacatgctggtgatcggcaattttggcctctcttgggaccagcaggttacccaaatggctctgtgggcaattatggccggtcctcttttcatgagcaacgatctgcgcgcgatctcaccacaggcaaaggccctgctccaagacaaagatgtgatagccatcaatcaggacccgttgggaaagcagggctaccagctgagaaaaggcgacaactttgaggtctgggaaaggcctttgagtggagatgcgtgggctgtggccattattaatcggcaagagatcggaggtccacgctcctatacaattcctgtagcatctcttggcaagggcgttgcctgtaacccagcttgcttcatcactcagcttctgccggtgaagagaaaactgggtttctacgaagctaccagcaggctccgatcccacatcaaccctacaggaaccgtcctcttgcagctggagaatacgatgcagacttcactgaaggacctcctg

SEQ ID NO: 1684 - protein, 398 aa, Artificial Sequence
  variant of human alpha-galactosidase A
LDNGLARTPPMGWLHWERFMCNLDCQEEPDSCISEKLFEEMAERMVFEGWKDAGYEYLCIDDCWMAPQRDSEGRLQADPQRFPHGIRQLANHVHSKGLKLGIYADVGNKTCAGFPGSFGYYDIDAQTFADWGVDLLKFDGCYCDSLENLADGYKHMSLALNRTGRPIVYSCEWPLYMWPFQKPNYTEIRQYCNHWRNFADIDDSWASIKSILDWTSRNQERIVDVAGPGGWNDPDMLVIGNFGLSWDQQVTQMALWAIMAGPLFMSNDLRAISPQAKALLQDKDVIAINQDPLGKQGYQLRKGDNFEVWERPLSGDAWAVAIINRQEIGGPRSYTIPVASLGKGVACNPACFITQLLPVKRKLGFYEATSRLRSHINPTGTVLLQLENTMQTSLKDLL

SEQ ID NO: 1685 - DNA, 1194 bp, Artificial Sequence
  variant of human alpha-galactosidase A
ctggataatggattggctagaacacctcctatggggtggcttcactgggagaggttcatgtgcaacctggactgtcaggaagaaccagacagctgcatctccgagaagctctttgaggaaatggccgaacgaatggtgggggagggctggaaagatgcaggttacgagtatctgtgtattgacgattgctggatggccccacaacgggattctgagggaagacttcaggctgatccgcagcgcttccctcatggcataaggcagctggcaaaccacgtccacagtaaggggctcaaattgggaatctacgcggacgtgggcaataagacctgtgccggttttccgggatcattcgggtattatgacattgacgcccaaacgtttgctgattggggcgttgacctgctgaaattcgatggttgctactgtgacagcctcgaaaacctggcagacggctacaagcatatgtctctcgccctgaatagaaccggtcggccaatcgtatattcctgcgagtggcctctttacatgtggccatttcagaaaccgaactacacagaaattcgccagtattgcaatcattggaggaacttcgctgatatcgatgactcatgggcctccataaagagcatcttggactggaccagtcggaatcaggagcgaattgtggatgtcgcaggccctggaggatggaacgatccagacatgctggtgatcggcaattttggcctctcttgggaccagcaggttacccaaatggctctgtgggcaattatggccggtcctcttttcatgagcaacgatctgcgcgcgatctcaccacaggcaaaggccctgctccaagacaaagatgtgatagccatcaatcaggacccgttgggaaagcagggctaccagctgagaaaaggcgacaactttgaggtctgggaaaggcctttgagtggagatgcgtgggctgtggccattattaatcggcaagagatcggaggtccacgctcctatacaattcctgtagcatctcttggcaagggcgttgcctgtaacccagcttgcttcatcactcagcttctgccggtgaagagaaaactgggtttctacgaagctaccagcaggctccgatcccacatcaaccctacaggaaccgtcctcttgcagctggagaatacgatgcagacttcactgaaggacctcctg

SEQ ID NO: 1686 - protein, 398 aa, Artificial Sequence
  variant of human alpha-galactosidase A
LDNGLARTPPMGWLHWERFMCNLDCQEEPDSCISEKLFEEMAERMVGEGWKDAGYEYLCIDDCWMAPQRDSEGRLQADPQRFPHGIRQLANHVHSKGLKLGIYADVGNKTCAGFPGSFGYYDIDAQTFADWGVDLLKFDGCYCDSLENLADGYKHMSLALNRTGRPIVYSCEWPLYMWPFQKPNYTEIRQYCNHWRNFADIDDSWASIKSILDWTSRNQERIVDVAGPGGWNDPDMLVIGNFGLSWDQQVTQMALWAIMAGPLFMSNDLRAISPQAKALLQDKDVIAINQDPLGKQGYQLRKGDNFEVWERPLSGDAWAVAIINRQEIGGPRSYTIPVASLGKGVACNPACFITQLLPVKRKLGFYEATSRLRSHINPTGTVLLQLENTMQTSLKDLL

SEQ ID NO: 1687 - DNA, 1194 bp, Artificial Sequence
  variant of human alpha-galactosidase A
ctggataatggattggctagaacacctcctatggggtggcttcactgggagaggttcatgtgcaacctggactgtcaggaagaaccagacagctgcatctccgagaagctctttgaggaaatggccgaacgaatggtgcacgagggctggaaagatgcaggttacgagtatctgtgtattgacgattgctggatggccccacaacgggattctgagggaagacttcaggctgatccgcagcgcttccctcatggcataaggcagctggcaaaccacgtccacagtaaggggctcaaattgggaatctacgcggacgtgggcaataagacctgtgccggttttccgggatcattcgggtattatgacattgacgcccaaacgtttgctgattggggcgttgacctgctgaaattcgatggttgctactgtgacagcctcgaaaacctggcagacggctacaagcatatgtctctcgccctgaatagaaccggtcggccaatcgtatattcctgcgagtggcctctttacatgtggccatttcagaaaccgaactacacagaaattcgccagtattgcaatcattggaggaacttcgctgatatcgatgactcatgggcctccataaagagcatcttggactggaccagtcggaatcaggagcgaattgtggatgtcgcaggccctggaggatggaacgatccagacatgctggtgatcggcaattttggcctctcttgggaccagcaggttacccaaatggctctgtgggcaattatggccggtcctcttttcatgagcaacgatctgcgcgcgatctcaccacaggcaaaggccctgctccaagacaaagatgtgatagccatcaatcaggacccgttgggaaagcagggctaccagctgagaaaaggcgacaactttgaggtctgggaaaggcctttgagtggagatgcgtgggctgtggccattattaatcggcaagagatcggaggtccacgctcctatacaattcctgtagcatctcttggcaagggcgttgcctgtaacccagcttgcttcatcactcagcttctgccggtgaagagaaaactgggtttctacgaagctaccagcaggctccgatcccacatcaaccctacaggaaccgtcctcttgcagctggagaatacgatgcagacttcactgaaggacctcctg

SEQ ID NO: 1688 - protein, 398 aa, Artificial Sequence
  variant of human alpha-galactosidase A
LDNGLARTPPMGWLHWERFMCNLDCQEEPDSCISEKLFEEMAERMVHEGWKDAGYEYLCIDDCWMAPQRDSEGRLQADPQRFPHGIRQLANHVHSKGLKLGIYADVGNKTCAGFPGSFGYYDIDAQTFADWGVDLLKFDGCYCDSLENLADGYKHMSLALNRTGRPIVYSCEWPLYMWPFQKPNYTEIRQYCNHWRNFADIDDSWASIKSILDWTSRNQERIVDVAGPGGWNDPDMLVIGNFGLSWDQQVTQMALWAIMAGPLFMSNDLRAISPQAKALLQDKDVIAINQDPLGKQGYQLRKGDNFEVWERPLSGDAWAVAIINRQEIGGPRSYTIPVASLGKGVACNPACFITQLLPVKRKLGFYEATSRLRSHINPTGTVLLQLENTMQTSLKDLL

SEQ ID NO: 1689 - DNA, 1194 bp, Artificial Sequence
  variant of human alpha-galactosidase A
ctggataatggattggctagaacacctcctatggggtggcttcactgggagaggttcatgtgcaacctggactgtcaggaagaaccagacagctgcatctccgagaagctctttgaggaaatggccgaacgaatggtgattgagggctggaaagatgcaggttacgagtatctgtgtattgacgattgctggatggccccacaacgggattctgagggaagacttcaggctgatccgcagcgcttccctcatggcataaggcagctggcaaaccacgtccacagtaaggggctcaaattgggaatctacgcggacgtgggcaataagacctgtgccggttttccgggatcattcgggtattatgacattgacgcccaaacgtttgctgattggggcgttgacctgctgaaattcgatggttgctactgtgacagcctcgaaaacctggcagacggctacaagcatatgtctctcgccctgaatagaaccggtcggccaatcgtatattcctgcgagtggcctctttacatgtggccatttcagaaaccgaactacacagaaattcgccagtattgcaatcattggaggaacttcgctgatatcgatgactcatgggcctccataaagagcatcttggactggaccagtcggaatcaggagcgaattgtggatgtcgcaggccctggaggatggaacgatccagacatgctggtgatcggcaattttggcctctcttgggaccagcaggttacccaaatggctctgtgggcaattatggccggtcctcttttcatgagcaacgatctgcgcgcgatctcaccacaggcaaaggccctgctccaagacaaagatgtgatagccatcaatcaggacccgttgggaaagcagggctaccagctgagaaaaggcgacaactttgaggtctgggaaaggcctttgagtggagatgcgtgggctgtggccattattaatcggcaagagatcggaggtccacgctcctatacaattcctgtagcatctcttggcaagggcgttgcctgtaacccagcttgcttcatcactcagcttctgccggtgaagagaaaactgggtttctacgaagctaccagcaggctccgatcccacatcaaccctacaggaaccgtcctcttgcagctggagaatacgatgcagacttcactgaaggacctcctg

SEQ ID NO: 1690 - protein, 398 aa, Artificial Sequence
  variant of human alpha-galactosidase A
LDNGLARTPPMGWLHWERFMCNLDCQEEPDSCISEKLFEEMAERMVIEGWKDAGYEYLCIDDCWMAPQRDSEGRLQADPQRFPHGIRQLANHVHSKGLKLGIYADVGNKTCAGFPGSFGYYDIDAQTFADWGVDLLKFDGCYCDSLENLADGYKHMSLALNRTGRPIVYSCEWPLYMWPFQKPNYTEIRQYCNHWRNFADIDDSWASIKSILDWTSRNQERIVDVAGPGGWNDPDMLVIGNFGLSWDQQVTQMALWAIMAGPLFMSNDLRAISPQAKALLQDKDVIAINQDPLGKQGYQLRKGDNFEVWERPLSGDAWAVAIINRQEIGGPRSYTIPVASLGKGVACNPACFITQLLPVKRKLGFYEATSRLRSHINPTGTVLLQLENTMQTSLKDLL

SEQ ID NO: 1691 - DNA, 1194 bp, Artificial Sequence
  variant of human alpha-galactosidase A
ctggataatggattggctagaacacctcctatggggtggcttcactgggagaggttcatgtgcaacctggactgtcaggaagaaccagacagctgcatctccgagaagctctttgaggaaatggccgaacgaatggtgaaggagggctggaaagatgcaggttacgagtatctgtgtattgacgattgctggatggccccacaacgggattctgagggaagacttcaggctgatccgcagcgcttccctcatggcataaggcagctggcaaaccacgtccacagtaaggggctcaaattgggaatctacgcggacgtgggcaataagacctgtgccggttttccgggatcattcgggtattatgacattgacgcccaaacgtttgctgattggggcgttgacctgctgaaattcgatggttgctactgtgacagcctcgaaaacctggcagacggctacaagcatatgtctctcgccctgaatagaaccggtcggccaatcgtatattcctgcgagtggcctctttacatgtggccatttcagaaaccgaactacacagaaattcgccagtattgcaatcattggaggaacttcgctgatatcgatgactcatgggcctccataaagagcatcttggactggaccagtcggaatcaggagcgaattgtggatgtcgcaggccctggaggatggaacgatccagacatgctggtgatcggcaattttggcctctcttgggaccagcaggttacccaaatggctctgtgggcaattatggccggtcctcttttcatgagcaacgatctgcgcgcgatctcaccacaggcaaaggccctgctccaagacaaagatgtgatagccatcaatcaggacccgttgggaaagcagggctaccagctgagaaaaggcgacaactttgaggtctgggaaaggcctttgagtggagatgcgtgggctgtggccattattaatcggcaagagatcggaggtccacgctcctatacaattcctgtagcatctcttggcaagggcgttgcctgtaacccagcttgcttcatcactcagcttctgccggtgaagagaaaactgggtttctacgaagctaccagcaggctccgatcccacatcaaccctacaggaaccgtcctcttgcagctggagaatacgatgcagacttcactgaaggacctcctg

SEQ ID NO: 1692 - protein, 398 aa, Artificial Sequence
  variant of human alpha-galactosidase A
LDNGLARTPPMGWLHWERFMCNLDCQEEPDSCISEKLFEEMAERMVKEGWKDAGYEYLCIDDCWMAPQRDSEGRLQADPQRFPHGIRQLANHVHSKGLKLGIYADVGNKTCAGFPGSFGYYDIDAQTFADWGVDLLKFDGCYCDSLENLADGYKHMSLALNRTGRPIVYSCEWPLYMWPFQKPNYTEIRQYCNHWRNFADIDDSWASIKSILDWTSRNQERIVDVAGPGGWNDPDMLVIGNFGLSWDQQVTQMALWAIMAGPLFMSNDLRAISPQAKALLQDKDVIAINQDPLGKQGYQLRKGDNFEVWERPLSGDAWAVAIINRQEIGGPRSYTIPVASLGKGVACNPACFITQLLPVKRKLGFYEATSRLRSHINPTGTVLLQLENTMQTSLKDLL

SEQ ID NO: 1693 - DNA, 1194 bp, Artificial Sequence
  variant of human alpha-galactosidase A
ctggataatggattggctagaacacctcctatggggtggcttcactgggagaggttcatgtgcaacctggactgtcaggaagaaccagacagctgcatctccgagaagctctttgaggaaatggccgaacgaatggtgttggagggctggaaagatgcaggttacgagtatctgtgtattgacgattgctggatggccccacaacgggattctgagggaagacttcaggctgatccgcagcgcttccctcatggcataaggcagctggcaaaccacgtccacagtaaggggctcaaattgggaatctacgcggacgtgggcaataagacctgtgccggttttccgggatcattcgggtattatgacattgacgcccaaacgtttgctgattggggcgttgacctgctgaaattcgatggttgctactgtgacagcctcgaaaacctggcagacggctacaagcatatgtctctcgccctgaatagaaccggtcggccaatcgtatattcctgcgagtggcctctttacatgtggccatttcagaaaccgaactacacagaaattcgccagtattgcaatcattggaggaacttcgctgatatcgatgactcatgggcctccataaagagcatcttggactggaccagtcggaatcaggagcgaattgtggatgtcgcaggccctggaggatggaacgatccagacatgctggtgatcggcaattttggcctctcttgggaccagcaggttacccaaatggctctgtgggcaattatggccggtcctcttttcatgagcaacgatctgcgcgcgatctcaccacaggcaaaggccctgctccaagacaaagatgtgatagccatcaatcaggacccgttgggaaagcagggctaccagctgagaaaaggcgacaactttgaggtctgggaaaggcctttgagtggagatgcgtgggctgtggccattattaatcggcaagagatcggaggtccacgctcctatacaattcctgtagcatctcttggcaagggcgttgcctgtaacccagcttgcttcatcactcagcttctgccggtgaagagaaaactgggtttctacgaagctaccagcaggctccgatcccacatcaaccctacaggaaccgtcctcttgcagctggagaatacgatgcagacttcactgaaggacctcctg

SEQ ID NO: 1694 - protein, 398 aa, Artificial Sequence
  variant of human alpha-galactosidase A
LDNGLARTPPMGWLHWERFMCNLDCQEEPDSCISEKLFEEMAERMVLEGWKDAGYEYLCIDDCWMAPQRDSEGRLQADPQRFPHGIRQLANHVHSKGLKLGIYADVGNKTCAGFPGSFGYYDIDAQTFADWGVDLLKFDGCYCDSLENLADGYKHMSLALNRTGRPIVYSCEWPLYMWPFQKPNYTEIRQYCNHWRNFADIDDSWASIKSILDWTSRNQERIVDVAGPGGWNDPDMLVIGNFGLSWDQQVTQMALWAIMAGPLFMSNDLRAISPQAKALLQDKDVIAINQDPLGKQGYQLRKGDNFEVWERPLSGDAWAVAIINRQEIGGPRSYTIPVASLGKGVACNPACFITQLLPVKRKLGFYEATSRLRSHINPTGTVLLQLENTMQTSLKDLL

SEQ ID NO: 1695 - DNA, 1194 bp, Artificial Sequence
  variant of human alpha-galactosidase A
ctggataatggattggctagaacacctcctatggggtggcttcactgggagaggttcatgtgcaacctggactgtcaggaagaaccagacagctgcatctccgagaagctctttgaggaaatggccgaacgaatggtgatggagggctggaaagatgcaggttacgagtatctgtgtattgacgattgctggatggccccacaacgggattctgagggaagacttcaggctgatccgcagcgcttccctcatggcataaggcagctggcaaaccacgtccacagtaaggggctcaaattgggaatctacgcggacgtgggcaataagacctgtgccggttttccgggatcattcgggtattatgacattgacgcccaaacgtttgctgattggggcgttgacctgctgaaattcgatggttgctactgtgacagcctcgaaaacctggcagacggctacaagcatatgtctctcgccctgaatagaaccggtcggccaatcgtatattcctgcgagtggcctctttacatgtggccatttcagaaaccgaactacacagaaattcgccagtattgcaatcattggaggaacttcgctgatatcgatgactcatgggcctccataaagagcatcttggactggaccagtcggaatcaggagcgaattgtggatgtcgcaggccctggaggatggaacgatccagacatgctggtgatcggcaattttggcctctcttgggaccagcaggttacccaaatggctctgtgggcaattatggccggtcctcttttcatgagcaacgatctgcgcgcgatctcaccacaggcaaaggccctgctccaagacaaagatgtgatagccatcaatcaggacccgttgggaaagcagggctaccagctgagaaaaggcgacaactttgaggtctgggaaaggcctttgagtggagatgcgtgggctgtggccattattaatcggcaagagatcggaggtccacgctcctatacaattcctgtagcatctcttggcaagggcgttgcctgtaacccagcttgcttcatcactcagcttctgccggtgaagagaaaactgggtttctacgaagctaccagcaggctccgatcccacatcaaccctacaggaaccgtcctcttgcagctggagaatacgatgcagacttcactgaaggacctcctg

SEQ ID NO: 1696 - protein, 398 aa, Artificial Sequence
  variant of human alpha-galactosidase A
LDNGLARTPPMGWLHWERFMCNLDCQEEPDSCISEKLFEEMAERMVMEGWKDAGYEYLCIDDCWMAPQRDSEGRLQADPQRFPHGIRQLANHVHSKGLKLGIYADVGNKTCAGFPGSFGYYDIDAQTFADWGVDLLKFDGCYCDSLENLADGYKHMSLALNRTGRPIVYSCEWPLYMWPFQKPNYTEIRQYCNHWRNFADIDDSWASIKSILDWTSRNQERIVDVAGPGGWNDPDMLVIGNFGLSWDQQVTQMALWAIMAGPLFMSNDLRAISPQAKALLQDKDVIAINQDPLGKQGYQLRKGDNFEVWERPLSGDAWAVAIINRQEIGGPRSYTIPVASLGKGVACNPACFITQLLPVKRKLGFYEATSRLRSHINPTGTVLLQLENTMQTSLKDLL

SEQ ID NO: 1697 - DNA, 1194 bp, Artificial Sequence
  variant of human alpha-galactosidase A
ctggataatggattggctagaacacctcctatggggtggcttcactgggagaggttcatgtgcaacctggactgtcaggaagaaccagacagctgcatctccgagaagctctttgaggaaatggccgaacgaatggtgaatgagggctggaaagatgcaggttacgagtatctgtgtattgacgattgctggatggccccacaacgggattctgagggaagacttcaggctgatccgcagcgcttccctcatggcataaggcagctggcaaaccacgtccacagtaaggggctcaaattgggaatctacgcggacgtgggcaataagacctgtgccggttttccgggatcattcgggtattatgacattgacgcccaaacgtttgctgattggggcgttgacctgctgaaattcgatggttgctactgtgacagcctcgaaaacctggcagacggctacaagcatatgtctctcgccctgaatagaaccggtcggccaatcgtatattcctgcgagtggcctctttacatgtggccatttcagaaaccgaactacacagaaattcgccagtattgcaatcattggaggaacttcgctgatatcgatgactcatgggcctccataaagagcatcttggactggaccagtcggaatcaggagcgaattgtggatgtcgcaggccctggaggatggaacgatccagacatgctggtgatcggcaattttggcctctcttgggaccagcaggttacccaaatggctctgtgggcaattatggccggtcctcttttcatgagcaacgatctgcgcgcgatctcaccacaggcaaaggccctgctccaagacaaagatgtgatagccatcaatcaggacccgttgggaaagcagggctaccagctgagaaaaggcgacaactttgaggtctgggaaaggcctttgagtggagatgcgtgggctgtggccattattaatcggcaagagatcggaggtccacgctcctatacaattcctgtagcatctcttggcaagggcgttgcctgtaacccagcttgcttcatcactcagcttctgccggtgaagagaaaactgggtttctacgaagctaccagcaggctccgatcccacatcaaccctacaggaaccgtcctcttgcagctggagaatacgatgcagacttcactgaaggacctcctg

SEQ ID NO: 1698 - protein, 398 aa, Artificial Sequence
  variant of human alpha-galactosidase A
LDNGLARTPPMGWLHWERFMCNLDCQEEPDSCISEKLFEEMAERMVNEGWKDAGYEYLCIDDCWMAPQRDSEGRLQADPQRFPHGIRQLANHVHSKGLKLGIYADVGNKTCAGFPGSFGYYDIDAQTFADWGVDLLKFDGCYCDSLENLADGYKHMSLALNRTGRPIVYSCEWPLYMWPFQKPNYTEIRQYCNHWRNFADIDDSWASIKSILDWTSRNQERIVDVAGPGGWNDPDMLVIGNFGLSWDQQVTQMALWAIMAGPLFMSNDLRAISPQAKALLQDKDVIAINQDPLGKQGYQLRKGDNFEVWERPLSGDAWAVAIINRQEIGGPRSYTIPVASLGKGVACNPACFITQLLPVKRKLGFYEATSRLRSHINPTGTVLLQLENTMQTSLKDLL

SEQ ID NO: 1699 - DNA, 1194 bp, Artificial Sequence
  variant of human alpha-galactosidase A
ctggataatggattggctagaacacctcctatggggtggcttcactgggagaggttcatgtgcaacctggactgtcaggaagaaccagacagctgcatctccgagaagctctttgaggaaatggccgaacgaatggtgccggagggctggaaagatgcaggttacgagtatctgtgtattgacgattgctggatggccccacaacgggattctgagggaagacttcaggctgatccgcagcgcttccctcatggcataaggcagctggcaaaccacgtccacagtaaggggctcaaattgggaatctacgcggacgtgggcaataagacctgtgccggttttccgggatcattcgggtattatgacattgacgcccaaacgtttgctgattggggcgttgacctgctgaaattcgatggttgctactgtgacagcctcgaaaacctggcagacggctacaagcatatgtctctcgccctgaatagaaccggtcggccaatcgtatattcctgcgagtggcctctttacatgtggccatttcagaaaccgaactacacagaaattcgccagtattgcaatcattggaggaacttcgctgatatcgatgactcatgggcctccataaagagcatcttggactggaccagtcggaatcaggagcgaattgtggatgtcgcaggccctggaggatggaacgatccagacatgctggtgatcggcaattttggcctctcttgggaccagcaggttacccaaatggctctgtgggcaattatggccggtcctcttttcatgagcaacgatctgcgcgcgatctcaccacaggcaaaggccctgctccaagacaaagatgtgatagccatcaatcaggacccgttgggaaagcagggctaccagctgagaaaaggcgacaactttgaggtctgggaaaggcctttgagtggagatgcgtgggctgtggccattattaatcggcaagagatcggaggtccacgctcctatacaattcctgtagcatctcttggcaagggcgttgcctgtaacccagcttgcttcatcactcagcttctgccggtgaagagaaaactgggtttctacgaagctaccagcaggctccgatcccacatcaaccctacaggaaccgtcctcttgcagctggagaatacgatgcagacttcactgaaggacctcctg

SEQ ID NO: 1700 - protein, 398 aa, Artificial Sequence
  variant of human alpha-galactosidase A
LDNGLARTPPMGWLHWERFMCNLDCQEEPDSCISEKLFEEMAERMVPEGWKDAGYEYLCIDDCWMAPQRDSEGRLQADPQRFPHGIRQLANHVHSKGLKLGIYADVGNKTCAGFPGSFGYYDIDAQTFADWGVDLLKFDGCYCDSLENLADGYKHMSLALNRTGRPIVYSCEWPLYMWPFQKPNYTEIRQYCNHWRNFADIDDSWASIKSILDWTSRNQERIVDVAGPGGWNDPDMLVIGNFGLSWDQQVTQMALWAIMAGPLFMSNDLRAISPQAKALLQDKDVIAINQDPLGKQGYQLRKGDNFEVWERPLSGDAWAVAIINRQEIGGPRSYTIPVASLGKGVACNPACFITQLLPVKRKLGFYEATSRLRSHINPTGTVLLQLENTMQTSLKDLL

SEQ ID NO: 1701 - DNA, 1194 bp, Artificial Sequence
  variant of human alpha-galactosidase A
ctggataatggattggctagaacacctcctatggggtggcttcactgggagaggttcatgtgcaacctggactgtcaggaagaaccagacagctgcatctccgagaagctctttgaggaaatggccgaacgaatggtgcaggagggctggaaagatgcaggttacgagtatctgtgtattgacgattgctggatggccccacaacgggattctgagggaagacttcaggctgatccgcagcgcttccctcatggcataaggcagctggcaaaccacgtccacagtaaggggctcaaattgggaatctacgcggacgtgggcaataagacctgtgccggttttccgggatcattcgggtattatgacattgacgcccaaacgtttgctgattggggcgttgacctgctgaaattcgatggttgctactgtgacagcctcgaaaacctggcagacggctacaagcatatgtctctcgccctgaatagaaccggtcggccaatcgtatattcctgcgagtggcctctttacatgtggccatttcagaaaccgaactacacagaaattcgccagtattgcaatcattggaggaacttcgctgatatcgatgactcatgggcctccataaagagcatcttggactggaccagtcggaatcaggagcgaattgtggatgtcgcaggccctggaggatggaacgatccagacatgctggtgatcggcaattttggcctctcttgggaccagcaggttacccaaatggctctgtgggcaattatggccggtcctcttttcatgagcaacgatctgcgcgcgatctcaccacaggcaaaggccctgctccaagacaaagatgtgatagccatcaatcaggacccgttgggaaagcagggctaccagctgagaaaaggcgacaactttgaggtctgggaaaggcctttgagtggagatgcgtgggctgtggccattattaatcggcaagagatcggaggtccacgctcctatacaattcctgtagcatctcttggcaagggcgttgcctgtaacccagcttgcttcatcactcagcttctgccggtgaagagaaaactgggtttctacgaagctaccagcaggctccgatcccacatcaaccctacaggaaccgtcctcttgcagctggagaatacgatgcagacttcactgaaggacctcctg

SEQ ID NO: 1702 - protein, 398 aa, Artificial Sequence
  variant of human alpha-galactosidase A
LDNGLARTPPMGWLHWERFMCNLDCQEEPDSCISEKLFEEMAERMVQEGWKDAGYEYLCIDDCWMAPQRDSEGRLQADPQRFPHGIRQLANHVHSKGLKLGIYADVGNKTCAGFPGSFGYYDIDAQTFADWGVDLLKFDGCYCDSLENLADGYKHMSLALNRTGRPIVYSCEWPLYMWPFQKPNYTEIRQYCNHWRNFADIDDSWASIKSILDWTSRNQERIVDVAGPGGWNDPDMLVIGNFGLSWDQQVTQMALWAIMAGPLFMSNDLRAISPQAKALLQDKDVIAINQDPLGKQGYQLRKGDNFEVWERPLSGDAWAVAIINRQEIGGPRSYTIPVASLGKGVACNPACFITQLLPVKRKLGFYEATSRLRSHINPTGTVLLQLENTMQTSLKDLL

SEQ ID NO: 1703 - DNA, 1194 bp, Artificial Sequence
  variant of human alpha-galactosidase A
ctggataatggattggctagaacacctcctatggggtggcttcactgggagaggttcatgtgcaacctggactgtcaggaagaaccagacagctgcatctccgagaagctctttgaggaaatggccgaacgaatggtgagggagggctggaaagatgcaggttacgagtatctgtgtattgacgattgctggatggccccacaacgggattctgagggaagacttcaggctgatccgcagcgcttccctcatggcataaggcagctggcaaaccacgtccacagtaaggggctcaaattgggaatctacgcggacgtgggcaataagacctgtgccggttttccgggatcattcgggtattatgacattgacgcccaaacgtttgctgattggggcgttgacctgctgaaattcgatggttgctactgtgacagcctcgaaaacctggcagacggctacaagcatatgtctctcgccctgaatagaaccggtcggccaatcgtatattcctgcgagtggcctctttacatgtggccatttcagaaaccgaactacacagaaattcgccagtattgcaatcattggaggaacttcgctgatatcgatgactcatgggcctccataaagagcatcttggactggaccagtcggaatcaggagcgaattgtggatgtcgcaggccctggaggatggaacgatccagacatgctggtgatcggcaattttggcctctcttgggaccagcaggttacccaaatggctctgtgggcaattatggccggtcctcttttcatgagcaacgatctgcgcgcgatctcaccacaggcaaaggccctgctccaagacaaagatgtgatagccatcaatcaggacccgttgggaaagcagggctaccagctgagaaaaggcgacaactttgaggtctgggaaaggcctttgagtggagatgcgtgggctgtggccattattaatcggcaagagatcggaggtccacgctcctatacaattcctgtagcatctcttggcaagggcgttgcctgtaacccagcttgcttcatcactcagcttctgccggtgaagagaaaactgggtttctacgaagctaccagcaggctccgatcccacatcaaccctacaggaaccgtcctcttgcagctggagaatacgatgcagacttcactgaaggacctcctg

SEQ ID NO: 1704 - protein, 398 aa, Artificial Sequence
  variant of human alpha-galactosidase A
LDNGLARTPPMGWLHWERFMCNLDCQEEPDSCISEKLFEEMAERMVREGWKDAGYEYLCIDDCWMAPQRDSEGRLQADPQRFPHGIRQLANHVHSKGLKLGIYADVGNKTCAGFPGSFGYYDIDAQTFADWGVDLLKFDGCYCDSLENLADGYKHMSLALNRTGRPIVYSCEWPLYMWPFQKPNYTEIRQYCNHWRNFADIDDSWASIKSILDWTSRNQERIVDVAGPGGWNDPDMLVIGNFGLSWDQQVTQMALWAIMAGPLFMSNDLRAISPQAKALLQDKDVIAINQDPLGKQGYQLRKGDNFEVWERPLSGDAWAVAIINRQEIGGPRSYTIPVASLGKGVACNPACFITQLLPVKRKLGFYEATSRLRSHINPTGTVLLQLENTMQTSLKDLL

SEQ ID NO: 1705 - DNA, 1194 bp, Artificial Sequence
  variant of human alpha-galactosidase A
ctggataatggattggctagaacacctcctatggggtggcttcactgggagaggttcatgtgcaacctggactgtcaggaagaaccagacagctgcatctccgagaagctctttgaggaaatggccgaacgaatggtgtctgagggctggaaagatgcaggttacgagtatctgtgtattgacgattgctggatggccccacaacgggattctgagggaagacttcaggctgatccgcagcgcttccctcatggcataaggcagctggcaaaccacgtccacagtaaggggctcaaattgggaatctacgcggacgtgggcaataagacctgtgccggttttccgggatcattcgggtattatgacattgacgcccaaacgtttgctgattggggcgttgacctgctgaaattcgatggttgctactgtgacagcctcgaaaacctggcagacggctacaagcatatgtctctcgccctgaatagaaccggtcggccaatcgtatattcctgcgagtggcctctttacatgtggccatttcagaaaccgaactacacagaaattcgccagtattgcaatcattggaggaacttcgctgatatcgatgactcatgggcctccataaagagcatcttggactggaccagtcggaatcaggagcgaattgtggatgtcgcaggccctggaggatggaacgatccagacatgctggtgatcggcaattttggcctctcttgggaccagcaggttacccaaatggctctgtgggcaattatggccggtcctcttttcatgagcaacgatctgcgcgcgatctcaccacaggcaaaggccctgctccaagacaaagatgtgatagccatcaatcaggacccgttgggaaagcagggctaccagctgagaaaaggcgacaactttgaggtctgggaaaggcctttgagtggagatgcgtgggctgtggccattattaatcggcaagagatcggaggtccacgctcctatacaattcctgtagcatctcttggcaagggcgttgcctgtaacccagcttgcttcatcactcagcttctgccggtgaagagaaaactgggtttctacgaagctaccagcaggctccgatcccacatcaaccctacaggaaccgtcctcttgcagctggagaatacgatgcagacttcactgaaggacctcctg

SEQ ID NO: 1706 - protein, 398 aa, Artificial Sequence
  variant of human alpha-galactosidase A
LDNGLARTPPMGWLHWERFMCNLDCQEEPDSCISEKLFEEMAERMVSEGWKDAGYEYLCIDDCWMAPQRDSEGRLQADPQRFPHGIRQLANHVHSKGLKLGIYADVGNKTCAGFPGSFGYYDIDAQTFADWGVDLLKFDGCYCDSLENLADGYKHMSLALNRTGRPIVYSCEWPLYMWPFQKPNYTEIRQYCNHWRNFADIDDSWASIKSILDWTSRNQERIVDVAGPGGWNDPDMLVIGNFGLSWDQQVTQMALWAIMAGPLFMSNDLRAISPQAKALLQDKDVIAINQDPLGKQGYQLRKGDNFEVWERPLSGDAWAVAIINRQEIGGPRSYTIPVASLGKGVACNPACFITQLLPVKRKLGFYEATSRLRSHINPTGTVLLQLENTMQTSLKDLL

SEQ ID NO: 1707 - DNA, 1194 bp, Artificial Sequence
  variant of human alpha-galactosidase A
ctggataatggattggctagaacacctcctatggggtggcttcactgggagaggttcatgtgcaacctggactgtcaggaagaaccagacagctgcatctccgagaagctctttgaggaaatggccgaacgaatggtggtggagggctggaaagatgcaggttacgagtatctgtgtattgacgattgctggatggccccacaacgggattctgagggaagacttcaggctgatccgcagcgcttccctcatggcataaggcagctggcaaaccacgtccacagtaaggggctcaaattgggaatctacgcggacgtgggcaataagacctgtgccggttttccgggatcattcgggtattatgacattgacgcccaaacgtttgctgattggggcgttgacctgctgaaattcgatggttgctactgtgacagcctcgaaaacctggcagacggctacaagcatatgtctctcgccctgaatagaaccggtcggccaatcgtatattcctgcgagtggcctctttacatgtggccatttcagaaaccgaactacacagaaattcgccagtattgcaatcattggaggaacttcgctgatatcgatgactcatgggcctccataaagagcatcttggactggaccagtcggaatcaggagcgaattgtggatgtcgcaggccctggaggatggaacgatccagacatgctggtgatcggcaattttggcctctcttgggaccagcaggttacccaaatggctctgtgggcaattatggccggtcctcttttcatgagcaacgatctgcgcgcgatctcaccacaggcaaaggccctgctccaagacaaagatgtgatagccatcaatcaggacccgttgggaaagcagggctaccagctgagaaaaggcgacaactttgaggtctgggaaaggcctttgagtggagatgcgtgggctgtggccattattaatcggcaagagatcggaggtccacgctcctatacaattcctgtagcatctcttggcaagggcgttgcctgtaacccagcttgcttcatcactcagcttctgccggtgaagagaaaactgggtttctacgaagctaccagcaggctccgatcccacatcaaccctacaggaaccgtcctcttgcagctggagaatacgatgcagacttcactgaaggacctcctg

SEQ ID NO: 1708 - protein, 398 aa, Artificial Sequence; identical to SEQ ID NO: 244
  variant of human alpha-galactosidase A

SEQ ID NO: 1709 - DNA, 1194 bp, Artificial Sequence
  variant of human alpha-galactosidase A
ctggataatggattggctagaacacctcctatggggtggcttcactgggagaggttcatgtgcaacctggactgtcaggaagaaccagacagctgcatctccgagaagctctttgaggaaatggccgaacgaatggtgtgggagggctggaaagatgcaggttacgagtatctgtgtattgacgattgctggatggccccacaacgggattctgagggaagacttcaggctgatccgcagcgcttccctcatggcataaggcagctggcaaaccacgtccacagtaaggggctcaaattgggaatctacgcggacgtgggcaataagacctgtgccggttttccgggatcattcgggtattatgacattgacgcccaaacgtttgctgattggggcgttgacctgctgaaattcgatggttgctactgtgacagcctcgaaaacctggcagacggctacaagcatatgtctctcgccctgaatagaaccggtcggccaatcgtatattcctgcgagtggcctctttacatgtggccatttcagaaaccgaactacacagaaattcgccagtattgcaatcattggaggaacttcgctgatatcgatgactcatgggcctccataaagagcatcttggactggaccagtcggaatcaggagcgaattgtggatgtcgcaggccctggaggatggaacgatccagacatgctggtgatcggcaattttggcctctcttgggaccagcaggttacccaaatggctctgtgggcaattatggccggtcctcttttcatgagcaacgatctgcgcgcgatctcaccacaggcaaaggccctgctccaagacaaagatgtgatagccatcaatcaggacccgttgggaaagcagggctaccagctgagaaaaggcgacaactttgaggtctgggaaaggcctttgagtggagatgcgtgggctgtggccattattaatcggcaagagatcggaggtccacgctcctatacaattcctgtagcatctcttggcaagggcgttgcctgtaacccagcttgcttcatcactcagcttctgccggtgaagagaaaactgggtttctacgaagctaccagcaggctccgatcccacatcaaccctacaggaaccgtcctcttgcagctggagaatacgatgcagacttcactgaaggacctcctg

SEQ ID NO: 1710 - protein, 398 aa, Artificial Sequence
  variant of human alpha-galactosidase A
LDNGLARTPPMGWLHWERFMCNLDCQEEPDSCISEKLFEEMAERMVWEGWKDAGYEYLCIDDCWMAPQRDSEGRLQADPQRFPHGIRQLANHVHSKGLKLGIYADVGNKTCAGFPGSFGYYDIDAQTFADWGVDLLKFDGCYCDSLENLADGYKHMSLALNRTGRPIVYSCEWPLYMWPFQKPNYTEIRQYCNHWRNFADIDDSWASIKSILDWTSRNQERIVDVAGPGGWNDPDMLVIGNFGLSWDQQVTQMALWAIMAGPLFMSNDLRAISPQAKALLQDKDVIAINQDPLGKQGYQLRKGDNFEVWERPLSGDAWAVAIINRQEIGGPRSYTIPVASLGKGVACNPACFITQLLPVKRKLGFYEATSRLRSHINPTGTVLLQLENTMQTSLKDLL

SEQ ID NO: 1711 - DNA, 1194 bp, Artificial Sequence
  variant of human alpha-galactosidase A
ctggataatggattggctagaacacctcctatggggtggcttcactgggagaggttcatgtgcaacctggactgtcaggaagaaccagacagctgcatctccgagaagctctttgaggaaatggccgaacgaatggtgtatgagggctggaaagatgcaggttacgagtatctgtgtattgacgattgctggatggccccacaacgggattctgagggaagacttcaggctgatccgcagcgcttccctcatggcataaggcagctggcaaaccacgtccacagtaaggggctcaaattgggaatctacgcggacgtgggcaataagacctgtgccggttttccgggatcattcgggtattatgacattgacgcccaaacgtttgctgattggggcgttgacctgctgaaattcgatggttgctactgtgacagcctcgaaaacctggcagacggctacaagcatatgtctctcgccctgaatagaaccggtcggccaatcgtatattcctgcgagtggcctctttacatgtggccatttcagaaaccgaactacacagaaattcgccagtattgcaatcattggaggaacttcgctgatatcgatgactcatgggcctccataaagagcatcttggactggaccagtcggaatcaggagcgaattgtggatgtcgcaggccctggaggatggaacgatccagacatgctggtgatcggcaattttggcctctcttgggaccagcaggttacccaaatggctctgtgggcaattatggccggtcctcttttcatgagcaacgatctgcgcgcgatctcaccacaggcaaaggccctgctccaagacaaagatgtgatagccatcaatcaggacccgttgggaaagcagggctaccagctgagaaaaggcgacaactttgaggtctgggaaaggcctttgagtggagatgcgtgggctgtggccattattaatcggcaagagatcggaggtccacgctcctatacaattcctgtagcatctcttggcaagggcgttgcctgtaacccagcttgcttcatcactcagcttctgccggtgaagagaaaactgggtttctacgaagctaccagcaggctccgatcccacatcaaccctacaggaaccgtcctcttgcagctggagaatacgatgcagacttcactgaaggacctcctg

SEQ ID NO: 1712 - protein, 398 aa, Artificial Sequence
  variant of human alpha-galactosidase A
LDNGLARTPPMGWLHWERFMCNLDCQEEPDSCISEKLFEEMAERMVYEGWKDAGYEYLCIDDCWMAPQRDSEGRLQADPQRFPHGIRQLANHVHSKGLKLGIYADVGNKTCAGFPGSFGYYDIDAQTFADWGVDLLKFDGCYCDSLENLADGYKHMSLALNRTGRPIVYSCEWPLYMWPFQKPNYTEIRQYCNHWRNFADIDDSWASIKSILDWTSRNQERIVDVAGPGGWNDPDMLVIGNFGLSWDQQVTQMALWAIMAGPLFMSNDLRAISPQAKALLQDKDVIAINQDPLGKQGYQLRKGDNFEVWERPLSGDAWAVAIINRQEIGGPRSYTIPVASLGKGVACNPACFITQLLPVKRKLGFYEATSRLRSHINPTGTVLLQLENTMQTSLKDLL

SEQ ID NO: 1713 - DNA, 1194 bp, Artificial Sequence
  variant of human alpha-galactosidase A
ctggataatggattggctagaacacctcctatggggtggcttcactgggagaggttcatgtgcaacctggactgtcaggaagaaccagacagctgcatctccgagaagctctttgaggaaatggccgaacgaatggtgactgacggctggaaagatgcaggttacgagtatctgtgtattgacgattgctggatggccccacaacgggattctgagggaagacttcaggctgatccgcagcgcttccctcatggcataaggcagctggcaaaccacgtccacagtaaggggctcaaattgggaatctacgcggacgtgggcaataagacctgtgccggttttccgggatcattcgggtattatgacattgacgcccaaacgtttgctgattggggcgttgacctgctgaaattcgatggttgctactgtgacagcctcgaaaacctggcagacggctacaagcatatgtctctcgccctgaataaaaccggtcggccaatcgtatattcctgcgagtggcctctttacatgtggccatttcagaaaccgaactacacagaaattcgccagtattgcaatcattggaggaacttcgctgatatcgatgactcatgggcctccataaagagcatcttggactggaccagtcggaatcaggagcgaattgtggatgtcgcaggccctggaggatggaacgatccagacatgctggtgatcggcaattttggcctctcttgggaccagcaggttacccaaatggctctgtgggcaattatggccggtcctcttttcatgagcaacgatctgcgcgcgatctcaccacaggcaaaggccctgctccaagacaaaagtgtgatagccatcaatcaggacccgttgggaaagcagggctaccagctgagaaaaggcgacaactttgaggtctgggaaaggcctttgagtggagatgcgtgggctgtggccattattaatcggcaagagatcggaggtccacgcggttatacaattcctgtagcaaagcttggcaagggcgttgcctgtaacccagcttgcttcatcactcagcttctgccggtgaagagaaaactgggtttctacgaagctaccagcaggctccgatcccacatcaaccctacaggaaccgtcctcttgcagctggagaatacgatgcagacttcactgaaggacctcctg

SEQ ID NO: 1714 - protein, 398 aa, Artificial Sequence
  variant of human alpha-galactosidase A
LDNGLARTPPMGWLHWERFMCNLDCQEEPDSCISEKLFEEMAERMVTDGWKDAGYEYLCIDDCWMAPQRDSEGRLQADPQRFPHGIRQLANHVHSKGLKLGIYADVGNKTCAGFPGSFGYYDIDAQTFADWGVDLLKFDGCYCDSLENLADGYKHMSLALNKTGRPIVYSCEWPLYMWPFQKPNYTEIRQYCNHWRNFADIDDSWASIKSILDWTSRNQERIVDVAGPGGWNDPDMLVIGNFGLSWDQQVTQMALWAIMAGPLFMSNDLRAISPQAKALLQDKSVIAINQDPLGKQGYQLRKGDNFEVWERPLSGDAWAVAIINRQEIGGPRGYTIPVAKLGKGVACNPACFITQLLPVKRKLGFYEATSRLRSHINPTGTVLLQLENTMQTSLKDLL

SEQ ID NO: 1715 - DNA, 1194 bp, Artificial Sequence
  variant of human alpha-galactosidase A
ctggataatggattggctagaacacctcctatggggtggcttcactgggagaggttcatgtgcaacctggactgtcaggaagaaccagacagctgcatctccgagaagctctttgaggaaatggccgaacgaatggtgactgacggctggaaagatgcaggttacgagtatctgtgtattgacgattgctggatggccccacaacgggattctgagggaagacttcaggctgatccgcagcgcttccctcatggcataaggcagctggcaaacaccgtccacagtaaggggctcaaattgggaatctacgcggacgtgggcaataagacctgtgccggttttccgggatcattcgggtattatgacattgacgcccaaacgtttgctgattggggcgttgacctgctgaaattcgatggttgctactgtgacagcctcgaaaacctggcagacggctacaagcatatgtctctcgccctgaataaaaccggtcggccaatcgtatattcctgcgagtggcctctttacatgtggccatttcagaaaccgaactacacagaaattcgccagtattgcaatcattggaggaacttcgctgatatcgatgactcatgggcctccataaagagcatcttggactggaccagtcgtaatcaggagcgaattgtggatgtcgcaggccctggaggatggaacgatccagacatgctggtgatcggcaattttggcctctcttgggaccagcaggttacccaaatggctctgtgggcaattatggccggtcctcttttcatgagcaacgatctgcgcgcgatctcaccacaggcaaaggccctgctccaagacaaagatgtgatagccatcaatcaggacccgttgggaaagcagggctaccagctgagaaaaggcgacaactttgaggtctgggaaaggcctttgagtggagatgcgtgggctgtggccattattaatcggcaagagatcggaggtccacgcggttatacaattcctgtagcaaagcttggcaagggcgttgcctgtaacccagcttgcttcatcactcagcttctgccggtgaagagaaaactgggtttctacgaagaaaccagcaggctccgatcccacatcaaccctacaggaaccgtcctcttgcagctggagaatacgatgcagacttcactgaaggacctcctg

SEQ ID NO: 1716 - protein, 398 aa, Artificial Sequence
  variant of human alpha-galactosidase A
LDNGLARTPPMGWLHWERFMCNLDCQEEPDSCISEKLFEEMAERMVTDGWKDAGYEYLCIDDCWMAPQRDSEGRLQADPQRFPHGIRQLANTVHSKGLKLGIYADVGNKTCAGFPGSFGYYDIDAQTFADWGVDLLKFDGCYCDSLENLADGYKHMSLALNKTGRPIVYSCEWPLYMWPFQKPNYTEIRQYCNHWRNFADIDDSWASIKSILDWTSRNQERIVDVAGPGGWNDPDMLVIGNFGLSWDQQVTQMALWAIMAGPLFMSNDLRAISPQAKALLQDKDVIAINQDPLGKQGYQLRKGDNFEVWERPLSGDAWAVAIINRQEIGGPRGYTIPVAKLGKGVACNPACFITQLLPVKRKLGFYEETSRLRSHINPTGTVLLQLENTMQTSLKDLL

SEQ ID NO: 1717 - DNA, 1194 bp, Artificial Sequence
  variant of human alpha-galactosidase A
ctggataatggattggctagaacacctcctatggggtggcttcactgggagaggttcatgtgcaacctggactgtcaggaagaaccagacagctgcatctccgagaagctctttgaggaaatggccgaacgaatggtgactgacggctggaaagatgcaggttacgagtatctgtgtattgacgattgctggatggccccacaacgggattctgagggaagacttcaggctgatccgcagcgcttccctcatggcataaggcagctggcaaaccacgtccacagtaaggggctcaaattgggaatctacgcggacgtgggcaataagacctgtgccggttttccgggatcattcgggtattatgacattgacgcccaaacgtttgctgattggggcgttgacctgctgaaattcgatggttgctactgtgacagcctcgaaaacctggcagacggctacaagcatatgtctctcgccctgaataaaaccggtcggccaatcgtatattcctgcgagtggcctctttacatgtggccatttcagaaaccgaactacacagaaattcgccagtattgcaatcattggaggaacttcgctgatatcgatgactcatgggcctccataaagagcatcttggactggaccagtcggaatcaggagcgaattgtggatgtcgcaggccctggaggatggaacgatccagacatgctggtgatcggcaattttggcctctcttgggaccagcaggttacccaaatggctctgtgggcaattatggccggtcctcttttcatgagcaacgatctgcgcgcgatctcaccacaggcaaaggccctgctccaagacacggacgtgatagccatcaatcaggacccgttgggaaagcagggctaccagctgagaaaaggcgacaactttgaggtctgggaaaggcctttgagtggagatgcgtgggctgtggccattattaatcggcaagagatcggaggtccacgcggttatacaattcctgtagcaaagcttggcaagggcgttgcctgtaacccagcttgcttcatcactcagcttctgccggtgaagagaaaactgggtttctacgaagctaccagcaggctccgatcccacatcaaccctacaggaaccgtcctcttgcagctggagaatacgatgcagacttcactgaaggacctcctg

SEQ ID NO: 1718 - protein, 398 aa, Artificial Sequence
  variant of human alpha-galactosidase A
LDNGLARTPPMGWLHWERFMCNLDCQEEPDSCISEKLFEEMAERMVTDGWKDAGYEYLCIDDCWMAPQRDSEGRLQADPQRFPHGIRQLANHVHSKGLKLGIYADVGNKTCAGFPGSFGYYDIDAQTFADWGVDLLKFDGCYCDSLENLADGYKHMSLALNKTGRPIVYSCEWPLYMWPFQKPNYTEIRQYCNHWRNFADIDDSWASIKSILDWTSRNQERIVDVAGPGGWNDPDMLVIGNFGLSWDQQVTQMALWAIMAGPLFMSNDLRAISPQAKALLQDTDVIAINQDPLGKQGYQLRKGDNFEVWERPLSGDAWAVAIINRQEIGGPRGYTIPVAKLGKGVACNPACFITQLLPVKRKLGFYEATSRLRSHINPTGTVLLQLENTMQTSLKDLL

SEQ ID NO: 1719 - DNA, 1194 bp, Artificial Sequence
  variant of human alpha-galactosidase A
ctggataatggattggctagaacacctcctatggggtggcttcactgggagaggttcatgtgcaacctggactgtcaggaagaaccagacagctgcatctccgagaagctctttgaggaaatggccgaacgaatggtgactgacggctggaaagatgcaggttacgagtatctgtgtattgacgattgctggatggccccacaacgggattctgagggaagacttcaggctgatccgcagcgcttccctcatggcataaggcagctggcaaaccacgtccacagtaaggggctcaaattgggaatctacgcggacgtgggcaataagacctgtgccggttttccgggatcattcgggtattatgacattgacgcccaaacgtttgctgattggggcgttgacctgctgaaattcgatggttgctactgtgacagcctcgaaaacctggcagacggctacaagcatatgtctctcgccctgaataaaaccggtcggcctatcgtatattcctgcgagtggcctctttacatgtggccatttcagaaaccgaactacacagaaattcgccagtattgcaatcattggaggaacttcgctgatatcgatgactcatgggcttccataaagagcatcttggactggaccagtcggaatcaggagcgaattgtggatgtcgcaggccctggaggatggaacgatccagacatgctggtgatcggcaattttggcctctcttgggaccagcaggttacccaaatggctctgtgggcaattatggccggtcctcttttcatgagcaacgatctgcgcgcgatctcaccacaggcaaaggccctgctccaagacacggaagtgatagccatcaatcaggacccgttgggaaagcagggctaccagctgagaaaaggcgacaactttgaggtctgggaaaggcctttgagtggagatgcgtgggctgtggccattattaatcggcaagagatcggaggtccacgcggttatacaattcctgtagcaaagcttggcaagggcgttgcctgtaacccagcttgcttcatcactcagcttctgccggtgaagagaaaactgggtttctacgaagctaccagcaggctccgatcccacatcaaccctacaggaaccgtcctcttgcagctggagaatacgatgcagacttcactgaaggacctcctg

SEQ ID NO: 1720 - protein, 398 aa, Artificial Sequence
  variant of human alpha-galactosidase A
LDNGLARTPPMGWLHWERFMCNLDCQEEPDSCISEKLFEEMAERMVTDGWKDAGYEYLCIDDCWMAPQRDSEGRLQADPQRFPHGIRQLANHVHSKGLKLGIYADVGNKTCAGFPGSFGYYDIDAQTFADWGVDLLKFDGCYCDSLENLADGYKHMSLALNKTGRPIVYSCEWPLYMWPFQKPNYTEIRQYCNHWRNFADIDDSWASIKSILDWTSRNQERIVDVAGPGGWNDPDMLVIGNFGLSWDQQVTQMALWAIMAGPLFMSNDLRAISPQAKALLQDTEVIAINQDPLGKQGYQLRKGDNFEVWERPLSGDAWAVAIINRQEIGGPRGYTIPVAKLGKGVACNPACFITQLLPVKRKLGFYEATSRLRSHINPTGTVLLQLENTMQTSLKDLL

SEQ ID NO: 1721 - DNA, 1194 bp, Artificial Sequence
  variant of human alpha-galactosidase A
ctggataatggattggctagaacacctcctatggggtggcttcactgggagaggttcatgtgcaacctggactgtcaggaagaaccagacagctgcatctccgagaagctctttgaggaaatggccgaacgaatggtgactgacggctggaaagatgcaggttacgagtatctgtgtattgacgattgctggatggccccacaacgggattctgagggaagacttcaggctgatccgcagcgcttccctcatggcataaggcagctggcaaaccacgtccacagtaaggggctcaaattgggaatctacgcggacgtgggcaataagacctgtgccggttttccgggatcattcgggtattatgacattgacgcccaaacgtttgctgattggggcgttgacctgctgaaattcgatggttgctactgtgacagcctcgaaaacctggcagacggctacaagcatatgtctctcgccctgaataaaaccggtcggccaatcgtatattcctgcgagtggcctctttacatgtggccatttcagaaaccgaactacacagaaattcgccagtattgcaatcattggaggaacttcgctgatatcgatgactcatgggcctccataaagagcatcttggactggaccagtcggaatcaggagcgaattgtggatgtcgcaggccctggaggatggaacgatccagacatgctggtgatcggcaattttggcctctcttgggaccagcaggttacccaaatggctctgtgggcaattatggccggtcctcttttcatgagcaacgatctgcgcgcgatctcaccacaggcaaaggccctgctccaagacaaaatggtgatagccatcaatcaggacccgttgggaaagcagggctaccagctgagaaaaggcgacaactttgaggtctgggaaaggcctttgagtggagatgcgtgggctgtggccattattaatcggcaagagatcggaggtccacgcggttacacaattcctgtagcaaagcttggcaagggcgttgcctgtaacccagcttgcttcatcactcagcttctgccggtgaagagaaaactgggtttctacgaagctaccagcaggctccgatcccacatcaaccctacaggaaccgtcctcttgcagctggagaatacgatgcagacttcactgaaggacctcctg

SEQ ID NO: 1722 - protein, 398 aa, Artificial Sequence
  variant of human alpha-galactosidase A
LDNGLARTPPMGWLHWERFMCNLDCQEEPDSCISEKLFEEMAERMVTDGWKDAGYEYLCIDDCWMAPQRDSEGRLQADPQRFPHGIRQLANHVHSKGLKLGIYADVGNKTCAGFPGSFGYYDIDAQTFADWGVDLLKFDGCYCDSLENLADGYKHMSLALNKTGRPIVYSCEWPLYMWPFQKPNYTEIRQYCNHWRNFADIDDSWASIKSILDWTSRNQERIVDVAGPGGWNDPDMLVIGNFGLSWDQQVTQMALWAIMAGPLFMSNDLRAISPQAKALLQDKMVIAINQDPLGKQGYQLRKGDNFEVWERPLSGDAWAVAIINRQEIGGPRGYTIPVAKLGKGVACNPACFITQLLPVKRKLGFYEATSRLRSHINPTGTVLLQLENTMQTSLKDLL

SEQ ID NO: 1723 - DNA, 1194 bp, Artificial Sequence
  variant of human alpha-galactosidase A
ctggataatggattggctagaacacctccaatggggtggcttcactgggagaggttcatgtgcaacctggactgtcaggaagaaccagacagctgcatctccgagaagctctttgaggaaatggccgaacgaatggtgactgacggctggaaagatgcaggttacgagtatctgtgtattgacgattgctggatggccccacaacgggattctgagggaagacttcaggctgatccgcagcgcttccctcatggcataaggcagctggcaaacaccgtccacagtaaggggctcaaattgggaatctacgcggacgtgggcaataagacctgtgccggttttccgggatcattcgggtattatgacattgacgcccaaacgtttgctgattggggcgttgacctgctgaaattcgatggttgctactgtgacagcctcgaaaacctggcagacggctacaagcatatgtctctcgccctgaataaaaccggtcggccaatcgtatattcctgcgagtggcctctttacatgtggccatttcagaaaccgaactacacagaaattcgccagtattgcaatcattggaggaacttcgctgatatcgatgactcatgggcatccataaagagcatcttggactggaccagtcgtaatcaggagcgaattgtggatgtcgcaggccctggaggatggaacgatccagacatgctggtgatcggcaattttggcctctcttgggaccagcaggttacccaaatggctctgtgggcaattatggccggtcctcttttcatgagcaacgatctgcgcgcgatctcaccacaggcaaaggccctgctccaagacaaagatgtgatagccatcaatcaggacccgttgggaaagcagggctaccagctgagaaaaggcgacaactttgaggtctgggaaaggcctttgagtggagatgcgtgggctgtggccattattaatcggcaagagatcggaggtccacgcggttatacaattcctgtagcaaagcttggcaagggcgttgcctgtaacccagcttgcttcatcactcagcttctgccggtgaagagaaaactgggtttctacgaagctaccagcaggctccgatcccacatcaaccctacaggaaccgtcctcttgcagctggagaatacgatgcagacttcactgaaggacctcctg

SEQ ID NO: 1724 - protein, 398 aa, Artificial Sequence
  variant of human alpha-galactosidase A
LDNGLARTPPMGWLHWERFMCNLDCQEEPDSCISEKLFEEMAERMVTDGWKDAGYEYLCIDDCWMAPQRDSEGRLQADPQRFPHGIRQLANTVHSKGLKLGIYADVGNKTCAGFPGSFGYYDIDAQTFADWGVDLLKFDGCYCDSLENLADGYKHMSLALNKTGRPIVYSCEWPLYMWPFQKPNYTEIRQYCNHWRNFADIDDSWASIKSILDWTSRNQERIVDVAGPGGWNDPDMLVIGNFGLSWDQQVTQMALWAIMAGPLFMSNDLRAISPQAKALLQDKDVIAINQDPLGKQGYQLRKGDNFEVWERPLSGDAWAVAIINRQEIGGPRGYTIPVAKLGKGVACNPACFITQLLPVKRKLGFYEATSRLRSHINPTGTVLLQLENTMQTSLKDLL

SEQ ID NO: 1725 - DNA, 1194 bp, Artificial Sequence
  variant of human alpha-galactosidase A
ctggataatggattggctagaacacctccaatggggtggcttcactgggagaggttcatgtgcaacctggactgtcaggaagaaccagacagctgcatctccgagaagctctttgaggaaatggccgaacgaatggtgactgacggctggaaagatgcaggttacgagtatctgtgtattgacgattgctggatggccccacaacgggattctgagggaagacttcaggctgatccgcagcgcttccctcatggcataaggcagctggcaaaccaggtccacagtaaggggctcaaattgggaatctacgcggacgtgggcaataagacctgtgccggttttccgggatcattcgggtattatgacattgacgcccaaacgtttgctgattggggcgttgacctgctgaaattcgatggttgctactgtgacagcctcgaaaacctggcagacggctacaagcatatgtctctcgccctgaataaaaccggtcggccaatcgtatattcctgcgagtggcctctttacatgtggccatttcagaaaccgaactacacagaaattcgccagtattgcaatcattggaggaacttcgctgatatcgatgactcatgggcctccataaagagcatcttggactggaccagtcggaatcaggagcgaattgtggatgtcgcaggccctggaggatggaacgatccagacatgctggtgatcggcaattttggcctctcttgggaccagcaggttacccaaatggctctgtgggcaattatggccggtcctcttttcatgagcaacgatctgcgcgcgatctcaccacaggcaaaggccctgctccaagacaaagatgtgatagccatcaatcaggacccgttgggaaagcagggctaccagctgagaaaaggcgacaactttgaggtctgggaaaggcctttgagtggagatgcgtgggctgtggccattattaatcggcaagagatcggaggtccacgcggttacacaattcctgtagcaaagcttggcaagggcgttgcctgtaacccagcttgcttcatcactcagcttctgccggtgaagagaaaactgggtttctacgaagcaaccagcaggctccgatcccacatcaaccctacaggaaccgtcctcttgcagctggagaatacgatgcagacttcactgaaggacctcctg

SEQ ID NO: 1726 - protein, 398 aa, Artificial Sequence
  variant of human alpha-galactosidase A
LDNGLARTPPMGWLHWERFMCNLDCQEEPDSCISEKLFEEMAERMVTDGWKDAGYEYLCIDDCWMAPQRDSEGRLQADPQRFPHGIRQLANQVHSKGLKLGIYADVGNKTCAGFPGSFGYYDIDAQTFADWGVDLLKFDGCYCDSLENLADGYKHMSLALNKTGRPIVYSCEWPLYMWPFQKPNYTEIRQYCNHWRNFADIDDSWASIKSILDWTSRNQERIVDVAGPGGWNDPDMLVIGNFGLSWDQQVTQMALWAIMAGPLFMSNDLRAISPQAKALLQDKDVIAINQDPLGKQGYQLRKGDNFEVWERPLSGDAWAVAIINRQEIGGPRGYTIPVAKLGKGVACNPACFITQLLPVKRKLGFYEATSRLRSHINPTGTVLLQLENTMQTSLKDLL

SEQ ID NO: 1727 - DNA, 1194 bp, Artificial Sequence
  variant of human alpha-galactosidase A
ctggataatggattggctagaacacctcctatggggtggcttcactgggagaggttcatgtgcaacctggactgtcaggaagaaccagacacctgcatctccgagaagctctttgaggaaatggccgaacgtatggtgcgcgacggctggaaagatgcaggttacgagtatctgtgtattgacgattgctggatggccccacaacgggattctgagggaagacttcaggctgatccgcagcgcttccctcatggcataaggcagctggcaaaccacgtccacagtaaggggctcaaattgggaatctacgcggacgtgggcaataagacctgtgccggttttccgggatcattcgggtattatgacattgacgcccaaacgtttgctgattggggcgttgacctgctgaaattcgatggttgctactgtgacagcctcgaaaacctggcagacggctacaagcatatgtctctcgccctgaataaaaccggtcggcctatcgtatattcctgcgagtggcctctttacatgtggccatttcagaaaccgaactacacagaaattcgccagtattgcaatcattggaggaacttcgctgatatcgatgactcatgggcctccataaagagcatcttggactggaccagtcggaatcaggagcgaattgtggatgtcgcaggccctggaggatggaacgatccagacatgctggtgatcggcaattttggcctctcttgggaccagcaggttacccaaatggctctgtgggcaattatggccggtcctcttttcatgagcaacgatctgcgcgcgatctcaccacaggcaaaggccctgctccaagacaaagatgtgatagccatcaatcaggacccgttgggaaagcagggctaccagctgagaaaaggcgacaactttgaggtctgggaaaggcctttgagtggagatgcgtgggctgtggccattattaatcggcaagagatcggaggtccacgcggttatacaattcctgtagcaaagcttggcaagggcgttgcctgtaacccagcttgcttcatcactcagcttctgccggtgaagagaaaactgggtttctacgaagctaccagcaggctccgatcccacatcaaccctacaggaaccgtcctcttgcagctggagaatacgatgcagacttcactgaaggacctcctg

SEQ ID NO: 1728 - protein, 398 aa, Artificial Sequence
  variant of human alpha-galactosidase A
LDNGLARTPPMGWLHWERFMCNLDCQEEPDTCISEKLFEEMAERMVRDGWKDAGYEYLCIDDCWMAPQRDSEGRLQADPQRFPHGIRQLANHVHSKGLKLGIYADVGNKTCAGFPGSFGYYDIDAQTFADWGVDLLKFDGCYCDSLENLADGYKHMSLALNKTGRPIVYSCEWPLYMWPFQKPNYTEIRQYCNHWRNFADIDDSWASIKSILDWTSRNQERIVDVAGPGGWNDPDMLVIGNFGLSWDQQVTQMALWAIMAGPLFMSNDLRAISPQAKALLQDKDVIAINQDPLGKQGYQLRKGDNFEVWERPLSGDAWAVAIINRQEIGGPRGYTIPVAKLGKGVACNPACFITQLLPVKRKLGFYEATSRLRSHINPTGTVLLQLENTMQTSLKDLL

SEQ ID NO: 1729 - DNA, 1194 bp, Artificial Sequence
  variant of human alpha-galactosidase A
ctggataatggattggctagaacacctcctatggggtggcttcactgggagaggttcatgtgcaacctggactgtcaggaagaaccagacagctgcatctccgagaagctctttgtggaaatggccgaagtgatggtgcgcgacggctggaaagatgcaggttacgagtatctgtgtattgacgattgctggatggccccacaacgggattctgagggaagacttcaggctgatccgcagcgcttccctcatggcataaggcagctggcaaaccacgtccacagtaaggggctcaaattgggaatctacgcggacgtgggcaataagacctgtgccggttttccgggatcattcgggtattatgacattgacgcccaaacgtttgctgattggggcgttgacctgctgaaattcgatggttgctactgtgacagcctcgaaaacctggcagacggctacaagcatatgtctctcgccctgaataaaaccggtcggccaatcgtatattcctgcgagtggcctctttacatgtggccatttcagaaaccgaactacacagaaattcgccagtattgcaatcattggaggaacttcgctgatatcgatgactcatgggcctccataaagagcatcttggactggaccagtcggaatcaggagcgaattgtggatgtcgcaggccctggaggatggaacgatccagacatgctggtgatcggcaattttggcctctcttgggaccagcaggttacccaaatggctctgtgggcaattatggccagccctcttttcatgagcaacgatctgcgcgcgatctcaccacaggcaaaggccctgctccaagacctggccgtgatagccatcaatcaggacccgttgggaaagcagggctaccagctgagaaaaggcgacaactttgaggtctgggaaaggcctttgagtggagatgcgtgggctgtggccattattaatcggcaagagatcggaggtccacgcggttatacaattcctgtagcaaagcttggcaagggcgttgcctgtaacccagcttgcttcatcactcagcttctgccggtgaagagaaaactgggtttctacgaagctaccagcaggctccgatcccacatcaaccctacaggaaccgtcctcttgcagctggagaatacgatgcagacttcactgaaggacctcctg

SEQ ID NO: 1730 - protein, 398 aa, Artificial Sequence
  variant of human alpha-galactosidase A
LDNGLARTPPMGWLHWERFMCNLDCQEEPDSCISEKLFVEMAEVMVRDGWKDAGYEYLCIDDCWMAPQRDSEGRLQADPQRFPHGIRQLANHVHSKGLKLGIYADVGNKTCAGFPGSFGYYDIDAQTFADWGVDLLKFDGCYCDSLENLADGYKHMSLALNKTGRPIVYSCEWPLYMWPFQKPNYTEIRQYCNHWRNFADIDDSWASIKSILDWTSRNQERIVDVAGPGGWNDPDMLVIGNFGLSWDQQVTQMALWAIMASPLFMSNDLRAISPQAKALLQDLAVIAINQDPLGKQGYQLRKGDNFEVWERPLSGDAWAVAIINRQEIGGPRGYTIPVAKLGKGVACNPACFITQLLPVKRKLGFYEATSRLRSHINPTGTVLLQLENTMQTSLKDLL

SEQ ID NO: 1731 - DNA, 1194 bp, Artificial Sequence
  variant of human alpha-galactosidase A
ctggataatggattggctagaacacctcctatggggtggcttcactgggagaggttcatgtgcaacctggactgtcaggaagaaccagacagctgcatctccgagaagctctttctggaaatggccgaacgaatggtgactgacggctggaaagatgcaggttacgagtatctgtgtattgacgattgctggatggccccacaacgggattctgagggaagacttcaggctgatccgcagcgcttccctcatggcataaggcagctggcaaaccacgtccacagtaaggggctcaaattgggaatctacgcggacgtgggcaataagacctgtgccggttttccgggatcattcgggtattatgacattgacgcccaaacgtttgctgattggggcgttgacctgctgaaattcgatggttgctactgtgacagcctcgaaaacctggcagacggctacaagcatatgtctctcgccctgaataaaaccggtcggccaatcgtatattcctgcgagtggcctctttacatgtggccatttcagaaaccgaactacacagaaattcgccagtattgcaatcattggaggaacttcgctgatatcgatgactcatgggcctccataaagagcatcttggactggaccagtcgtaatcaggagcgaattgtggatgtcgcaggccctggaggatggaacgatccagacatgctggtgatcggcaattttggcctctcttgggaccagcaggttacccaaatggctctgtgggcaattatggccggtcctcttttcatgagcaacgatctgcgcgcgatctcaccacaggcaaaggccctgctccaagacaaaagtgtgatagccatcaatcaggacccgttgggaaagcagggctaccagctgagaaaaggcgacaactttgaggtctgggaaaggcctttgagtggagatgcgtgggctgtggccattattaatcggcaagagatcggaggtccacgcggttatacaattcctgtagcaaagcttggcaagggcgttgcctgtaacccagcttgcttcatcactcagcttctgccggtgaagagaaaactgggtttctacgaagcaaccagcaggctccgatcccacatcaaccctacaggaaccgtcctcttgcagctggagaatacgatgcagacttcactgaaggacctcctg

SEQ ID NO: 1732 - protein, 398 aa, Artificial Sequence
  variant of human alpha-galactosidase A
LDNGLARTPPMGWLHWERFMCNLDCQEEPDSCISEKLFLEMAERMVTDGWKDAGYEYLCIDDCWMAPQRDSEGRLQADPQRFPHGIRQLANHVHSKGLKLGIYADVGNKTCAGFPGSFGYYDIDAQTFADWGVDLLKFDGCYCDSLENLADGYKHMSLALNKTGRPIVYSCEWPLYMWPFQKPNYTEIRQYCNHWRNFADIDDSWASIKSILDWTSRNQERIVDVAGPGGWNDPDMLVIGNFGLSWDQQVTQMALWAIMAGPLFMSNDLRAISPQAKALLQDKSVIAINQDPLGKQGYQLRKGDNFEVWERPLSGDAWAVAIINRQEIGGPRGYTIPVAKLGKGVACNPACFITQLLPVKRKLGFYEATSRLRSHINPTGTVLLQLENTMQTSLKDLL

SEQ ID NO: 1733 - DNA, 1194 bp, Artificial Sequence
  variant of human alpha-galactosidase A
ctggataatggattggctagaacacctcctatggggtggcttcactgggagaggttcatgtgcaacctggactgtcaggaagaaccagacagctgcatctccgagaagctctttgaggaaatggccgaacgaatggtgactgacggctggaaagatgcaggttacgagtatctgtgtattgacgattgctggatggccccacaacgggattctgagggaagacttcaggctgatccgcagcgcttccctcatggcataaggcagctggcaaaccacgtccacagtaaggggctcaaattgggaatctacgcggacgtgggcaataagacctgtgccggttttccgggatcattcgggtattatgacattgacgcccaaacgtttgctgattggggcgttgacctgctgaaattcgatggttgctactgtgacagcctcgaaaacctggcagacggctacaagcatatgtctctcgccctgaataaaaccggtcggccaatcgtatattcctgcgagtggcctctttacatgtggccatttcagaaaccgaactacacagaaattcgccagtattgcaatcattggaggaacttcgctgatatcgatgactcatggatttccataaagagcatcttggactggaccagtcgtaatcaggagcgaattgtggatgtcgcaggccctggaggatggaacgatccagacatgctggtgatcggcaattttggcctctcttgggaccagcaggttacccaaatggctctgtgggcaattatggccggtcctcttttcatgagcaacgatctgcgcgcgatctcaccacaggcaaaggccctgctccaagacaaagacgtgatagccatcaatcaggacccgttgggaaagcagggctaccagctgagaaaaggcgacaactttgaggtctgggaaaggcctttgagtggagatgcgtgggctgtggccattattaatcggcaagagatcggaggtccacgcggttatacaattcctgtagcaaagcttggcaagggcgttgcctgtaacccagcttgcttcatcactcagcttctgccggtgaagagaaaactgggtttctacgaagctaccagcaggctccgatcccacatcaaccctacaggaaccgtcctcttgcagctggagaatacgatgcagacttcactgaaggacctcctg

SEQ ID NO: 1734 - protein, 398 aa, Artificial Sequence
  variant of human alpha-galactosidase A
LDNGLARTPPMGWLHWERFMCNLDCQEEPDSCISEKLFEEMAERMVTDGWKDAGYEYLCIDDCWMAPQRDSEGRLQADPQRFPHGIRQLANHVHSKGLKLGIYADVGNKTCAGFPGSFGYYDIDAQTFADWGVDLLKFDGCYCDSLENLADGYKHMSLALNKTGRPIVYSCEWPLYMWPFQKPNYTEIRQYCNHWRNFADIDDSWISIKSILDWTSRNQERIVDVAGPGGWNDPDMLVIGNFGLSWDQQVTQMALWAIMAGPLFMSNDLRAISPQAKALLQDKDVIAINQDPLGKQGYQLRKGDNFEVWERPLSGDAWAVAIINRQEIGGPRGYTIPVAKLGKGVACNPACFITQLLPVKRKLGFYEATSRLRSHINPTGTVLLQLENTMQTSLKDLL

SEQ ID NO: 1735 - DNA, 1194 bp, Artificial Sequence
  variant of human alpha-galactosidase A
ctggataatggattggctagaacacctcctatggggtggcttcactgggagaggttcatgtgcaacctggactgtcaggaagaaccagacagctgcatctccgagaagctctttgtggaaatggccgaagtgatggtgactgacggctggaaagatgcaggttacgagtatctgtgtattgacgattgctggatggccccacaacgggattctgagggaagacttcaggctgatccgcagcgcttccctcatggcataaggcagctggcaaaccacgtccacagtaaggggctcaaattgggaatctacgcggacgtgggcaataagacctgtgccggttttccgggatcattcgggtattatgacattgacgcccaaacgtttgctgattggggcgttgacctgctgaaattcgatggttgctactgtgacagcctcgaaaacctggcagacggctacaagcatatgtctctcgccctgaataaaaccggtcggcctatcgtatattcctgcgagtggcctctttacatgtggccatttcagaaaccgaactacacagaaattcgccagtattgcaatcattggaggaacttcgctgatatcgatgactcatgggcttccataaagagcatcttggactggaccagtcggaatcaggagcgaattgtggatgtcgcaggccctggaggatggaacgatccagacatgctggtgatcggcaattttggcctctcttgggaccagcaggttacccaaatggctctgtgggcaattatggccggccctcttttcatgagcaacgatctgcgcgcgatctcaccacaggcaaaggccctgctccaagacacggacgtgatagccatcaatcaggacccgttgggaaagcagggctaccagctgagaaaaggcgacaactttgaggtctgggaaaggcctttgagtggagatgcgtgggctgtggccattattaatcggcaagagatcggaggtccacgcggttatacaattcctgtagcaaagcttggcaagggcgttgcctgtaacccagcttgcttcatcactcagcttctgccggtgaagagaaaactgggtttctacgaagctaccagcaggctccgatcccacatcaaccctacaggaaccgtcctcttgcagctggagaatacgatgcagacttcactgaaggacctcctg

SEQ ID NO: 1736 - protein, 398 aa, Artificial Sequence
  variant of human alpha-galactosidase A
LDNGLARTPPMGWLHWERFMCNLDCQEEPDSCISEKLFVEMAEVMVTDGWKDAGYEYLCIDDCWMAPQRDSEGRLQADPQRFPHGIRQLANHVHSKGLKLGIYADVGNKTCAGFPGSFGYYDIDAQTFADWGVDLLKFDGCYCDSLENLADGYKHMSLALNKTGRPIVYSCEWPLYMWPFQKPNYTEIRQYCNHWRNFADIDDSWASIKSILDWTSRNQERIVDVAGPGGWNDPDMLVIGNFGLSWDQQVTQMALWAIMAGPLFMSNDLRAISPQAKALLQDTDVIAINQDPLGKQGYQLRKGDNFEVWERPLSGDAWAVAIINRQEIGGPRGYTIPVAKLGKGVACNPACFITQLLPVKRKLGFYEATSRLRSHINPTGTVLLQLENTMQTSLKDLL

SEQ ID NO: 1737 - DNA, 1194 bp, Artificial Sequence
  variant of human alpha-galactosidase A
ctggataatggattggctagaacacctcctatggggtggcttcactgggagaggttcatgtgcaacctggactgtcaggaagaaccagacagctgcatctccgagaagctctttgaagaaatggccgaacgaatggtgactgacggctggaaagatgcaggttacgagtatctgtgtattgacgattgctggatggccccacaacgggattctgagggaagacttcaggctgatccgcagcgcttccctcatggcataaggcagctggcaaacgtagtccacagtaaggggctcaaattgggaatctacgcggacgtgggcaataagacctgtgccggttttccgggatcattcgggtattatgacattgacgcccaaacgtttgctgattggggcgttgacctgctgaaattcgatggttgctactgtgacagcctcgaaaacctggcagacggctacaagcatatgtctctcgccctgaataaaaccggtcggccaatcgtatattcctgcgagtggcctctttacatgtggccatttcagaaaccgaactacacagaaattcgccagtattgcaatcattggaggaacttcgctgatatcgatgactcatgggcctccataaagagcatcttggactggaccagtcggaatcaggagcgaattgtggatgtcgcaggccctggaggatggaacgatccagacatgctggtgatcggcaattttggcctctcttgggaccagcaggttacccaaatggctctgtgggcaattatggccggtcctcttttcatgagcaacgatctgcgcgcgatctcaccagcagcaaaggccctgctccaagacaaaagtgtgatagccatcaatcaggacccgttgggaaagcagggctaccagctgagaaaaggcgacaactttgaggtctgggaaaggcctttgagtggagatgcgtgggctgtggccattattaatcggcaagagatcggaggtccacgcggttatacaattcctgtagcaaagcttggcaagggcgttgcctgtaacccagcttgcttcatcactcagcttctgccggtgaagagaaaactgggtttctacgaagcaaccagcaggctccgatcccacatcaaccctacaggaaccgtcctcttgcagctggagaatacgatgcagacttcactgaaggacctcctg

SEQ ID NO: 1738 - protein, 398 aa, Artificial Sequence
  variant of human alpha-galactosidase A
LDNGLARTPPMGWLHWERFMCNLDCQEEPDSCISEKLFEEMAERMVTDGWKDAGYEYLCIDDCWMAPQRDSEGRLQADPQRFPHGIRQLANVVHSKGLKLGIYADVGNKTCAGFPGSFGYYDIDAQTFADWGVDLLKFDGCYCDSLENLADGYKHMSLALNKTGRPIVYSCEWPLYMWPFQKPNYTEIRQYCNHWRNFADIDDSWASIKSILDWTSRNQERIVDVAGPGGWNDPDMLVIGNFGLSWDQQVTQMALWAIMAGPLFMSNDLRAISPAAKALLQDKSVIAINQDPLGKQGYQLRKGDNFEVWERPLSGDAWAVAIINRQEIGGPRGYTIPVAKLGKGVACNPACFITQLLPVKRKLGFYEATSRLRSHINPTGTVLLQLENTMQTSLKDLL

SEQ ID NO: 1739 - DNA, 1194 bp, Artificial Sequence
  variant of human alpha-galactosidase A
ctggataatggattggctagaacacctcctatggggtggcttcactgggagaggttcatgtgcaacctggactgtcaggaagaaccagacagctgcatctccgagaagctctttgaggaaatggccgaacgaatggtgactgacggctggaaagatgcaggttacgagtatctgtgtattgacgattgctggatggccccacaacgggattctgagggaagacttcaggctgatccgcagcgcttccctcatggcataaggcagctggcaaacaccgtccacagtaaggggctcaaattgggaatctacgcggacgtgggcaataagacctgtgccggttttccgggatcattcgggtattatgacattgacgcccaaacgtttgctgattggggcgttgacctgctgaaattcgatggttgctactgtgacagcctcgaaaacctggcagacggctacaagcatatgtctctcgccctgaataaaaccggtcggccaatcgtatattcctgcgagtggcctctttacatgtggccatttcagaaaccgaactacacagaaattcgccagtattgcaatcattggaggaacttcgctgatatcgatgactcatgggcctccataaagagcatcttggactggaccagtcggaatcaggagcgaattgtggatgtcgcaggccctggaggatggaacgatccagacatgctggtgatcggcaattttggcctctcttgggaccagcaggttacccaaatggctctgtgggcaattatggccggtcctcttttcatgagcaacgatctgcgcgctatctcaccacaggcaaaggccctgctccaagaccctgatgtgatagccatcaatcaggacccgttgggaaagcagggctaccagctgagaaaaggcgacaactttgaggtctgggaaaggcctttgagtggagatgcgtgggctgtggccattattaatcggcaagagatcggaggtccacgcggttacacaattcctgtagcaaagcttggcaagggcgttgcctgtaacccagcttgcttcatcactcagcttctgccggtgaagagaaaactgggtttctacgaagctaccagcaggctccgatcccacatcaaccctacaggaaccgtcctcttgcagctggagaatacgatgcagacttcactgaaggacctcctg

SEQ ID NO: 1740 - protein, 398 aa, Artificial Sequence
  variant of human alpha-galactosidase A
LDNGLARTPPMGWLHWERFMCNLDCQEEPDSCISEKLFEEMAERMVTDGWKDAGYEYLCIDDCWMAPQRDSEGRLQADPQRFPHGIRQLANTVHSKGLKLGIYADVGNKTCAGFPGSFGYYDIDAQTFADWGVDLLKFDGCYCDSLENLADGYKHMSLALNKTGRPIVYSCEWPLYMWPFQKPNYTEIRQYCNHWRNFADIDDSWASIKSILDWTSRNQERIVDVAGPGGWNDPDMLVIGNFGLSWDQQVTQMALWAIMAGPLFMSNDLRAISPQAKALLQDPDVIAINQDPLGKQGYQLRKGDNFEVWERPLSGDAWAVAIINRQEIGGPRGYTIPVAKLGKGVACNPACFITQLLPVKRKLGFYEATSRLRSHINPTGTVLLQLENTMQTSLKDLL

SEQ ID NO: 1741 - DNA, 1194 bp, Artificial Sequence
  variant of human alpha-galactosidase A
ctggataatggattggctagaacacctcctatggggtggcttcactgggagaggttcatgtgcaacctggactgtcaggaagaaccagacagctgcatctccgagaagctctttgaggaaatggccgaacgaatggtgactgacggctggaaagatgcaggttacgagtatctgtgtattgacgattgctggatggccccacaacgggattctgagggaagacttcaggctgatccgcagcgcttccctcatggcataaggcagctggcaaacaccgtccacagtaaggggctcaaattgggaatctacgcggacgtgggcaataagacctgtgccggttttccgggatcattcgggtattatgacattgacgcccaaacgtttgctgattggggcgttgacctgctgaaattcgatggttgctactgtgacagcctcgaaaacctggcagacggctacaagcatatgtctctcgccctgaataaaaccggtcggccaatcgtatattcctgcgagtggcctctttacatgtggccatttcagaaaccgaactacacagaaattcgccagtattgcaatcattggaggaacttcgctgatatcgatgactcatgggcctccataaagagcatcttggactggaccagtcggaatcaggagcgaattgtggatgtcgcaggccctggaggatggaacgatccagacatgctggtgatcggcaattttggcctctcttgggaccagcaggttacccaaatggctctgtgggcaattatggccggtcctcttttcatgagcaacgatctgcgcgcgatctcaccacaggcaaaggccctgctccaagacaaaatggtgatagccatcaatcaggacccgttgggaaagcagggctaccagctgagaaaaggcgacaactttgaggtctgggaaaggcctttgagtggagatgcgtgggctgtggccattattaatcggcaagagatcggaggtccacgcggttatacaattcctgtagcaaagcttggcaagggcgttgcctgtaacccagcttgcttcatcactcagcttctgccggtgaagagaaaactgggtttctacgaagctaccagcaggctccgatcccacatcaaccctacaggaaccgtcctcttgcagctggagaatacgatgcagacttcactgaaggacctcctg

SEQ ID NO: 1742 - protein, 398 aa, Artificial Sequence
  variant of human alpha-galactosidase A
LDNGLARTPPMGWLHWERFMCNLDCQEEPDSCISEKLFEEMAERMVTDGWKDAGYEYLCIDDCWMAPQRDSEGRLQADPQRFPHGIRQLANTVHSKGLKLGIYADVGNKTCAGFPGSFGYYDIDAQTFADWGVDLLKFDGCYCDSLENLADGYKHMSLALNKTGRPIVYSCEWPLYMWPFQKPNYTEIRQYCNHWRNFADIDDSWASIKSILDWTSRNQERIVDVAGPGGWNDPDMLVIGNFGLSWDQQVTQMALWAIMAGPLFMSNDLRAISPQAKALLQDKMVIAINQDPLGKQGYQLRKGDNFEVWERPLSGDAWAVAIINRQEIGGPRGYTIPVAKLGKGVACNPACFITQLLPVKRKLGFYEATSRLRSHINPTGTVLLQLENTMQTSLKDLL

SEQ ID NO: 1743 - DNA, 1194 bp, Artificial Sequence
  variant of human alpha-galactosidase A
ctggataatggattggctagaacacctcctatggggtggcttcactgggagaggttcatgtgcaacctggactgtcaggaagaaccagacagctgcatctccgagaagctctttgaggaaatggccgaacgaatggtgactgacggctggaaagatgcaggttacgagtatctgtgtattgacgattgctggatggccccacaacgggattctgagggaagacttcaggctgatccgcagcgcttccctcatggcataaggcagctggcaaaccacgtccacagtaaggggctcaaattgggaatctacgcggacgtgggcaataagacctgtgccggttttccgggatcattcgggtattatgacattgacgcccaaacgtttgctgattggggcgttgacctgctgaaattcgatggttgctactgtgacagcctcgaaaacctggcagacggctacaagttcatgtctctcgccctgaataaaaccggtcggccaatcgtatattcctgcgagtggcctctttacatgtggccatttcagaaaccgaactacacagaaattcgccagtattgcaatcattggaggaacttcgctgatatcgatgactcatgggcctccataaagagcatcttggactggaccagtcggaatcaggagcgaattgtggatgtcgcaggccctggaggatggaacgatccagacatgctggtgatcggcaattttggcctctcttgggaccagcaggttacccaaatggctctgtgggcaattatggccggtcctcttttcatgagcaacgatctgcgcgcgatctcaccacaggcaaaggccctgctccaagacaaagacgtgatagccatcaatcaggacccgttgggaaagcagggctaccagctgagaaaaggcgacaactttgaggtctgggaaaggcctttgagtggagatgcgtgggctgtggccattattaatcggcaagagatcggaggtccacgcggttatacaattcctgtagcaaagcttggcaagggcgttgcctgtaacccagcttgcttcatcactcagcttctgccggtgaagagaaaactgggtttctacgaagctaccagcaggctccgatcccacatcaaccctacaggaaccgtcctcttgcagctggagaatacgatgcagacttcactgaaggacctcctg

SEQ ID NO: 1744 - protein, 398 aa, Artificial Sequence
  variant of human alpha-galactosidase A
LDNGLARTPPMGWLHWERFMCNLDCQEEPDSCISEKLFEEMAERMVTDGWKDAGYEYLCIDDCWMAPQRDSEGRLQADPQRFPHGIRQLANHVHSKGLKLGIYADVGNKTCAGFPGSFGYYDIDAQTFADWGVDLLKFDGCYCDSLENLADGYKFMSLALNKTGRPIVYSCEWPLYMWPFQKPNYTEIRQYCNHWRNFADIDDSWASIKSILDWTSRNQERIVDVAGPGGWNDPDMLVIGNFGLSWDQQVTQMALWAIMAGPLFMSNDLRAISPQAKALLQDKDVIAINQDPLGKQGYQLRKGDNFEVWERPLSGDAWAVAIINRQEIGGPRGYTIPVAKLGKGVACNPACFITQLLPVKRKLGFYEATSRLRSHINPTGTVLLQLENTMQTSLKDLL

SEQ ID NO: 1745 - DNA, 1194 bp, Artificial Sequence
  variant of human alpha-galactosidase A
ctggataatggattggctagaacacctcctatggggtggcttcactgggagaggttcatgtgcaacctggactgtcaggaagaaccagacagctgcatctccgagaagctctttgaggaaatggccgaacgaatggtgactgacggctggaaagatgcaggttacgagtatctgtgtattgacgattgctggatggccccacaacgggattctgagggaagacttcaggctgatccgcagcgcttccctcatggcataaggcagctggcaaaccacgtccacagtaaggggctcaaattgggaatctacgcggacgtgggcaataagacctgtgccggttttccgggatcattcgggtattatgacattgacgcccaaacgtttgctgattggggcgttgacctgctgaaattcgatggttgctactgtgacagcctcgaaaacctggcagacggctacaagcatatgtctctcgccctgaataaaaccggtcggccaatcgtatattcctgcgagtggcctctttacatgtggccatttcagaaaccgaactacacagaaattcgccagtattgcaatcattggaggaacttcgctgatatcgatgactcatgggcctccataaagagcatcttggactggaccagtcggaatcaggagcgaattgtggatgtcgcaggccctggaggatggaacgatccagacatgctggtgatcggcaattttggcctctcttgggaccagcaggttacccaaatggctctgtgggcaattatggccggtcctcttttcatgagcaacgatctgcgcgcgatctcaccacaggcaaaggccctgctccaagacaaagatgtgatagccatcaatcaggacccgttgggaaagcagggctaccagctgagactgggcgacaactttgaggtctgggaaaggcctttgagtggagatgcgtgggctgtggccattattaatcggcaagagatcggaggtccacgcggttatacaattcctgtagcaaagcttggcaagggcgttgcctgtaacccagcttgcttcatcactcagcttctgccggtgaagagaaaactgggtttctacgaagctaccagcaggctccgatcccacatcaaccctacaggaaccgtcctcttgcagctggagaatacgatgcagacttcactgaaggacctcctg

SEQ ID NO: 1746 - protein, 398 aa, Artificial Sequence
  variant of human alpha-galactosidase A
LDNGLARTPPMGWLHWERFMCNLDCQEEPDSCISEKLFEEMAERMVTDGWKDAGYEYLCIDDCWMAPQRDSEGRLQADPQRFPHGIRQLANHVHSKGLKLGIYADVGNKTCAGFPGSFGYYDIDAQTFADWGVDLLKFDGCYCDSLENLADGYKHMSLALNKTGRPIVYSCEWPLYMWPFQKPNYTEIRQYCNHWRNFADIDDSWASIKSILDWTSRNQERIVDVAGPGGWNDPDMLVIGNFGLSWDQQVTQMALWAIMAGPLFMSNDLRAISPQAKALLQDKDVIAINQDPLGKQGYQLRLGDNFEVWERPLSGDAWAVAIINRQEIGGPRGYTIPVAKLGKGVACNPACFITQLLPVKRKLGFYEATSRLRSHINPTGTVLLQLENTMQTSLKDLL

SEQ ID NO: 1747 - DNA, 1194 bp, Artificial Sequence
  variant of human alpha-galactosidase A
ctggataatggattggctagaacacctcctatggggtggcttcactgggagaggttcatgtgcaacctggactgtcaggaagaaccagacagctgcatctccgagaagctctttgaggaaatggccgaacgaatggtgactgacggctggaaagatgcaggttacgagtatctgtgtattgacgattgctggatggccccacaacgggattctgagggaagacttcaggctgatccgcagcgcttccctcatggcataaggcagctggcaaaccacgtccacagtaaggggctcaaattgggaatctacgcggacgtgggcaataagacctgtgccggttttccgggatcattcgggtattatgacattgacgcccaaacgtttgctgattggggcgttgacctgctgaaattcgatggttgctactgtgacagcctcgaaaacctggcagacggctacaagcatatgtctctcgccctgaataaaaccggtcggccaatcgtatattcctgcgagtggcctctttacatgtggccatttcagaaaccgaactacacagaaattcgccagtattgcaatcattggaggaacttcgctgatatcgatgactcatgggcctccataaagagcatcttggactggaccagtcggaatcaggagcgaattgtggatgtcgcaggccctggaggatggaacgatccagacatgctggtgatcggcaattttggcctctcttgggaccagcaggttacccaaatggctctgtgggcaattatggccagccctcttttcatgagcaacgatctgcgcgcgatctcaccacaggcaaaggccctgctccaagacaaagatgtgatagccatcaatcaggacccgttgggaaagcagggctaccagctgagaaaaggcgacaactttgaggtctgggaaaggcctttgagtggagatgcgtgggctgtggccattattaatcggcaagagatcggaggtccacgcggttatacaattcctgtagcaaagcttggcaagggcgttgcctgtaacccagcttgcttcatcactcagcttctgccggtgaagagaaaactgggtttctacgaagctaccagcaggctccgatcccacatcaaccctacaggaaccgtcctcttgcagctggagaatacgatgcagacttcactgaaggacctcctg

SEQ ID NO: 1748 - protein, 398 aa, Artificial Sequence
  variant of human alpha-galactosidase A
LDNGLARTPPMGWLHWERFMCNLDCQEEPDSCISEKLFEEMAERMVTDGWKDAGYEYLCIDDCWMAPQRDSEGRLQADPQRFPHGIRQLANHVHSKGLKLGIYADVGNKTCAGFPGSFGYYDIDAQTFADWGVDLLKFDGCYCDSLENLADGYKHMSLALNKTGRPIVYSCEWPLYMWPFQKPNYTEIRQYCNHWRNFADIDDSWASIKSILDWTSRNQERIVDVAGPGGWNDPDMLVIGNFGLSWDQQVTQMALWAIMASPLFMSNDLRAISPQAKALLQDKDVIAINQDPLGKQGYQLRKGDNFEVWERPLSGDAWAVAIINRQEIGGPRGYTIPVAKLGKGVACNPACFITQLLPVKRKLGFYEATSRLRSHINPTGTVLLQLENTMQTSLKDLL

SEQ ID NO: 1749 - DNA, 1194 bp, Artificial Sequence
  variant of human alpha-galactosidase A
ctggataatggattggctagaacacctcctatggggtggcttcactgggagaggttcatgtgcaacctggactgtcaggaagaaccagacagctgcatctccgagaagctctttgaggaaatggccgaacgaatggtgactgacggctggaaagatgcaggttacgagtatctgtgtattgacgattgctggatggccccacaacgggattctgagggaagacttcaggctgatccgcagcgcttccctcatggcataaggcagctggcaaaccacgtccacagtaaggggctcaaattgggaatctacgcggacgtgggcaataagacctgtgccggttttccgggatcattcgggtattatgacattgacgcccaaacgtttgctgattggggcgttgacctgctgaaattcgatggttgctactgtgacagcctcgaaaacctggcagacggctacaagcatatgtctctcgccctgaataaaaccggtcggccaatcgtatattcctgcgagtggcctctttacatgtggccatttcagaaaccgaactacacagaaattcgccagtattgcaatcattggaggaacttcgctgatatcgatgactcatgggcctccataaagagcatcttggactggaccagtcggaatcaggagcgaattgtggatgtcgcaggccctggaggatggaacgatccagacatgctggtgatcggcaattttggcctctcttgggaccagcaggttacccaaatggctctgtgggcaattatggccggtcctcttttcatgagcaacgatctgcgcaagatctcaccacaggcaaaggccctgctccaagacaaagatgtgatagccatcaatcaggacccgttgggaaagcagggctaccagctgagaaaaggcgacaactttgaggtctgggaaaggcctttgagtggagatgcgtgggctgtggccattattaatcggcaagagatcggaggtccacgcggttatacaattcctgtagcaaagcttggcaagggcgttgcctgtaacccagcttgcttcatcactcagcttctgccggtgaagagaaaactgggtttctacgaagaaaccagcaggctccgatcccacatcaaccctacaggaaccgtcctcttgcagctggagaatacgatgcagacttcactgaaggacctcctg

SEQ ID NO: 1750 - protein, 398 aa, Artificial Sequence
  variant of human alpha-galactosidase A
LDNGLARTPPMGWLHWERFMCNLDCQEEPDSCISEKLFEEMAERMVTDGWKDAGYEYLCIDDCWMAPQRDSEGRLQADPQRFPHGIRQLANHVHSKGLKLGIYADVGNKTCAGFPGSFGYYDIDAQTFADWGVDLLKFDGCYCDSLENLADGYKHMSLALNKTGRPIVYSCEWPLYMWPFQKPNYTEIRQYCNHWRNFADIDDSWASIKSILDWTSRNQERIVDVAGPGGWNDPDMLVIGNFGLSWDQQVTQMALWAIMAGPLFMSNDLRKISPQAKALLQDKDVIAINQDPLGKQGYQLRKGDNFEVWERPLSGDAWAVAIINRQEIGGPRGYTIPVAKLGKGVACNPACFITQLLPVKRKLGFYEETSRLRSHINPTGTVLLQLENTMQTSLKDLL

SEQ ID NO: 1751 - DNA, 1194 bp, Artificial Sequence
  variant of human alpha-galactosidase A
ctggataatggattggctagaacacctcctatggggtggcttcactgggagaggttcatgtgcaacctggactgtcaggaagaaccagacagctgcatctccgagaagctctttgaggaaatggccgaacgaatggtgactgacggctggaaagatgcaggttacgagtatctgtgtattgacgattgctggatggccccacaacgggattctgagggaagacttcaggctgatccgcagcgcttccctaaaggcataaggcagctggcaaacgtagtccacagtaaggggctcaaattgggaatctacgcggacgtgggcaataagacctgtgccggttttccgggatcattcgggtattatgacattgacgcccaaacgtttgctgattggggcgttgacctgctgaaattcgatggttgctactgtgacagcctcgaaaacctggcagacggctacaagcatatgtctctcgccctgaataaaaccggtcggccaatcgtatattcctgcgagtggcctctttacatgtggccatttcagaaaccgaactacacagaaattcgccagtattgcaatcattggaggaacttcgctgatatcgatgactcatgggcctccataaagagcatcttggactggaccagtcggaatcaggagcgaattgtggatgtcgcaggccctggaggatggaacgatccagacatgctggtgatcggcaattttggcctctcttgggaccagcaggttacccaaatggctctgtgggcaattatggccggtcctcttttcatgagcaacgatctgcgcgcgatctcaccacaggcaaaggccctgctccaagacaaagatgtgatagccatcaatcaggacccgttgggaaagcagggctaccagctgagaaaaggcgacaactttgaggtctgggaaaggcctttgagtggagatgcgtgggctgtggccattattaatcggcaagagatcggaggtccacgcggttatacaattcctgtagcaaagcttggcaagggcgttgcctgtaacccagcttgcttcatcactcagcttctgccggtgaagagaaaactgggtttctacgaagctaccagcaggctccgatcccacatcaaccctacaggaaccgtcctcttgcagctggagaatacgatgcagacttcactgaaggacctcctg

SEQ ID NO: 1752 - protein, 398 aa, Artificial Sequence
  variant of human alpha-galactosidase A
LDNGLARTPPMGWLHWERFMCNLDCQEEPDSCISEKLFEEMAERMVTDGWKDAGYEYLCIDDCWMAPQRDSEGRLQADPQRFPKGIRQLANVVHSKGLKLGIYADVGNKTCAGFPGSFGYYDIDAQTFADWGVDLLKFDGCYCDSLENLADGYKHMSLALNKTGRPIVYSCEWPLYMWPFQKPNYTEIRQYCNHWRNFADIDDSWASIKSILDWTSRNQERIVDVAGPGGWNDPDMLVIGNFGLSWDQQVTQMALWAIMAGPLFMSNDLRAISPQAKALLQDKDVIAINQDPLGKQGYQLRKGDNFEVWERPLSGDAWAVAIINRQEIGGPRGYTIPVAKLGKGVACNPACFITQLLPVKRKLGFYEATSRLRSHINPTGTVLLQLENTMQTSLKDLL

SEQ ID NO: 1753 - DNA, 1194 bp, Artificial Sequence
  variant of human alpha-galactosidase A
ctggataatggattggctagaacacctcctatggggtggcttcactgggagaggttcatgtgcaacctggactgtcaggaagaaccagacagctgcatctccgagaagctctttgaggaaatggccgaacgaatggtgactgacggctggaaagatgcaggttacgagtatctgtgtattgacgattgctggatggccccacaacgggattctgagggaagacttcaggctgatccgcagcgcttccctcatggcataaggcagctggcaaacaccgtccacagtaaggggctcaaattgggaatctacgcggacgtgggcaataagacctgtgccggttttccgggatcattcgggtattatgacattgacgcccaaacgtttgctgattggggcgttgacctgctgaaattcgatggttgctactgtgacagcctcgaaaacctggcagacggctacaagcatatgtctctcgccctgaataaaaccggtcggccaatcgtatattcctgcgagtggcctctttacatgtggccatttcagaaaccgaactacacagaaattcgccagtattgcaatcattggaggaacttcgctgatatcgatgactcatgggcatccataaagagcatcttggactggaccagtcggaatcaggagcgaattgtggatgtcgcaggccctggaggatggaacgatccagacatgctggtgatcggcaattttggcctctcttgggaccagcaggttacccaaatggctctgtgggcaattatggccggtcctcttttcatgagcaacgatctgcgcaagatctcaccacaggcaaaggccctgctccaagacaaagatgtgatagccatcaatcaggacccgttgggaaagcagggctaccagctgagaaaaggcgacaactttgaggtctgggaaaggcctttgagtggagatgcgtgggctgtggccattattaatcggcaagagatcggaggtccacgcggttatacaattcctgtagcaaagcttggcaagggcgttgcctgtaacccagcttgcttcatcactcagcttctgccggtgaagagaaaactgggtttctacgaagctaccagcaggctccgatcccacatcaaccctacaggaaccgtcctcttgcagctggagaatacgatgcagacttcactgaaggacctcctg

SEQ ID NO: 1754 - protein, 398 aa, Artificial Sequence
  variant of human alpha-galactosidase A
LDNGLARTPPMGWLHWERFMCNLDCQEEPDSCISEKLFEEMAERMVTDGWKDAGYEYLCIDDCWMAPQRDSEGRLQADPQRFPHGIRQLANTVHSKGLKLGIYADVGNKTCAGFPGSFGYYDIDAQTFADWGVDLLKFDGCYCDSLENLADGYKHMSLALNKTGRPIVYSCEWPLYMWPFQKPNYTEIRQYCNHWRNFADIDDSWASIKSILDWTSRNQERIVDVAGPGGWNDPDMLVIGNFGLSWDQQVTQMALWAIMAGPLFMSNDLRKISPQAKALLQDKDVIAINQDPLGKQGYQLRKGDNFEVWERPLSGDAWAVAIINRQEIGGPRGYTIPVAKLGKGVACNPACFITQLLPVKRKLGFYEATSRLRSHINPTGTVLLQLENTMQTSLKDLL

SEQ ID NO: 1755 - DNA, 1194 bp, Artificial Sequence
  variant of human alpha-galactosidase A
ctggataatggattggctagaacacctcctatggggtggcttcactgggagaggttcatgtgcaacctggactgtcaggaagaaccagacagctgcatctccgagaagctctttgaggaaatggccgaacgaatggtgactgacggctggaaagatgcaggttacgagtatctgtgtattgacgattgctggatggccccacaacgggattctgagggaagacttcaggctgatccgcagcgcttccctcatggcataaggcagctggcaaacgtagtccacagtaaggggctcaaattgggaatctacgcggacgtgggcaataagacctgtgccggttttccgggatcattcgggtattatgacattgacgcccaaacgtttgctgattggggcgttgacctgctgaaattcgatggttgctactgtgacagcctcgaaaacctggcagacggctacaagcatatgtctctcgccctgaataaaaccggtcggccaatcgtatattcctgcgagtggcctctttacatgtggccatttcagaaaccgaactacacagaaattcgccagtattgcaatcattggaggaacttcgctgatatcgatgactcatgggaatccataaagagcatcttggactggaccagtcgtaatcaggagcgaattgtggatgtcgcaggccctggaggatggaacgatccagacatgctggtgatcggcaattttggcctctcttgggaccagcaggttacccaaatggctctgtgggcaattatggccggtcctcttttcatgagcaacgatctgcgcgcgatctcaccacaggcaaaggccctgctccaagacaaaagtgtgatagccatcaatcaggacccgttgggaaagcagggctaccagctgagaaaaggcgacaactttgaggtctgggaaaggcctttgagtggagatgcgtgggctgtggccattattaatcggcaagagatcggaggtccacgcggttatacaattcctgtagcaaagcttggcaagggcgttgcctgtaacccagcttgcttcatcactcagcttctgccggtgaagagaaaactgggtttctacgaagcaaccagcaggctccgatcccacatcaaccctacaggaaccgtcctcttgcagctggagaatacgatgcagacttcactgaaggacctcctg

SEQ ID NO: 1756 - protein, 398 aa, Artificial Sequence
  variant of human alpha-galactosidase A
LDNGLARTPPMGWLHWERFMCNLDCQEEPDSCISEKLFEEMAERMVTDGWKDAGYEYLCIDDCWMAPQRDSEGRLQADPQRFPHGIRQLANVVHSKGLKLGIYADVGNKTCAGFPGSFGYYDIDAQTFADWGVDLLKFDGCYCDSLENLADGYKHMSLALNKTGRPIVYSCEWPLYMWPFQKPNYTEIRQYCNHWRNFADIDDSWESIKSILDWTSRNQERIVDVAGPGGWNDPDMLVIGNFGLSWDQQVTQMALWAIMAGPLFMSNDLRAISPQAKALLQDKSVIAINQDPLGKQGYQLRKGDNFEVWERPLSGDAWAVAIINRQEIGGPRGYTIPVAKLGKGVACNPACFITQLLPVKRKLGFYEATSRLRSHINPTGTVLLQLENTMQTSLKDLL

SEQ ID NO: 1757 - DNA, 1194 bp, Artificial Sequence
  variant of human alpha-galactosidase A
ctggataatggattggctagaacacctcctatggggtggcttcactgggagaggttcatgtgcaacctggactgtcaggaagaaccagacagctgcatctccgagaagctctttgaggaaatggccgaacgaatggtgactgacggctggaaagatgcaggttacgagtatctgtgtattgacgattgctggatggccccacaacgggattctgagggaagacttcaggctgatccgcagcgcttccctcatggcataaggcagctggcaaaccacgtccacagtaaggggctcaaattgggaatctacgcggacgtgggcaataagacctgtgccggttttccgggatcattcgggtattatgacattgacgcccaaacgtttgctgattggggcgttgacctgctgaaattcgatggttgctactgtgacagcctcgaaaacctggcagacggctacaagcatatgtctctcgccctgaataaaaccggtcggccaatcgtatattcctgcgagtggcctctttacatgtggccatttcagaaaccgaactacacagaaattcgccagtattgcaatcattggaggaacttcgctgatatcgatgactcatgggcctccataaagagcatcttggactggaccagtcggaatcaggagcgaattgtggatgtcgcaggccctggaggatggaacgatccagacatgctggtgatcggcaattttggcctctcttgggaccagcaggttacccaaatggctctgtgggcaattatggccagccctcttttcatgagcaacgatctgcgcgcgatctcaccacaggcaaaggccctgctccaagacctggacgtgatagccatcaatcaggacccgttgggaaagcagggctaccagctgagaaaaggcgacaactttgaggtctgggaaaggcctttgagtggagatgcgtgggctgtggccattattaatcggcaagagatcggaggtccacgcggttatacaattcctgtagcaaagcttggcaagggcgttgcctgtaacccagcttgcttcatcactcagcttctgccggtgaagagaaaactgggtttctacgaagctaccagcaggctccgatcccacatcaaccctacaggaaccgtcctcttgcagctggagaatacgatgcagacttcactgaaggacctcctg

SEQ ID NO: 1758 - protein, 398 aa, Artificial Sequence
  variant of human alpha-galactosidase A
LDNGLARTPPMGWLHWERFMCNLDCQEEPDSCISEKLFEEMAERMVTDGWKDAGYEYLCIDDCWMAPQRDSEGRLQADPQRFPHGIRQLANHVHSKGLKLGIYADVGNKTCAGFPGSFGYYDIDAQTFADWGVDLLKFDGCYCDSLENLADGYKHMSLALNKTGRPIVYSCEWPLYMWPFQKPNYTEIRQYCNHWRNFADIDDSWASIKSILDWTSRNQERIVDVAGPGGWNDPDMLVIGNFGLSWDQQVTQMALWAIMASPLFMSNDLRAISPQAKALLQDLDVIAINQDPLGKQGYQLRKGDNFEVWERPLSGDAWAVAIINRQEIGGPRGYTIPVAKLGKGVACNPACFITQLLPVKRKLGFYEATSRLRSHINPTGTVLLQLENTMQTSLKDLL

SEQ ID NO: 1759 - DNA, 1194 bp, Artificial Sequence
  variant of human alpha-galactosidase A
ctggataatggattggctagaacacctcctatggggtggcttcactgggagaggttcatgtgcaacctggactgtcaggaagaaccagacacctgcatctccgagaagctctttgaggaaatggccgaacgaatggtgactgacggctggaaagatgcaggttacgagtatctgtgtattgacgattgctggatggccccacaacgggattctgagggaagacttcaggctgatccgcagcgcttccctcatggcataaggcagctggcaaaccacgtccacagtaaggggctcaaattgggaatctacgcggacgtgggcaataagacctgtgccggttttccgggatcattcgggtattatgacattgacgcccaaacgtttgctgattggggcgttgacctgctgaaattcgatggttgctactgtgacagcctcgaaaacctggcagacggctacaagcatatgtctctcgccctgaataaaaccggtcggccaatcgtatattcctgcgagtggcctctttacatgtggccatttcagaaaccgaactacacagaaattcgccagtattgcaatcattggaggaacttcgctgatatcgatgactcatgggcctccataaagagcatcttggactggaccagtcggaatcaggagcgaattgtggatgtcgcaggccctggaggatggaacgatccagacatgctggtgatcggcaattttggcctctcttgggaccagcaggttacccaaatggctctgtgggcaattatggccggtcctcttttcatgagcaacgatctgcgcgcgatctcaccacaggcaaaggccctgctccaagacaaagatgtgatagccatcaatcaggacccgttgggaaagcagggctaccagctgagaaaaggcgacaactttgaggtctgggaaaggcctttgagtggagatgcgtgggctgtggccattattaatcggcaagagatcggaggtccacgcggttatacaattcctgtagcaaagcttggcaagggcgttgcctgtaacccagcttgcttcatcactcagcttctgccggtgaagagaaaactgggtttctacgaagctaccagcaggctccgatcccacatcaaccctacaggaaccgtcctcttgcagctggagaatacgatgcagacttcactgaaggacctcctg

SEQ ID NO: 1760 - protein, 398 aa, Artificial Sequence
  variant of human alpha-galactosidase A
LDNGLARTPPMGWLHWERFMCNLDCQEEPDTCISEKLFEEMAERMVTDGWKDAGYEYLCIDDCWMAPQRDSEGRLQADPQRFPHGIRQLANHVHSKGLKLGIYADVGNKTCAGFPGSFGYYDIDAQTFADWGVDLLKFDGCYCDSLENLADGYKHMSLALNKTGRPIVYSCEWPLYMWPFQKPNYTEIRQYCNHWRNFADIDDSWASIKSILDWTSRNQERIVDVAGPGGWNDPDMLVIGNFGLSWDQQVTQMALWAIMAGPLFMSNDLRAISPQAKALLQDKDVIAINQDPLGKQGYQLRKGDNFEVWERPLSGDAWAVAIINRQEIGGPRGYTIPVAKLGKGVACNPACFITQLLPVKRKLGFYEATSRLRSHINPTGTVLLQLENTMQTSLKDLL

SEQ ID NO: 1761 - DNA, 1194 bp, Artificial Sequence
  variant of human alpha-galactosidase A
ctggataatggattggctagaacacctcctatggggtggcttcactgggagaggttcatgtgcaacctggactgtcaggaagaaccagacagctgcatctccgagaagctctttgaggaaatggccgaacgaatggtgactgacggctggaaagatgcaggttacgagtatctgtgtattgacgattgctggatggccccacaacgggattctgagggaagacttcaggctgatccgcagcgcttccctaaaggcataaggcagctggcaaaccacgtccacagtaaggggctcaaattgggaatctacgcggacgtgggcaataagacctgtgccggttttccgggatcattcgggtattatgacattgacgcccaaacgtttgctgattggggcgttgacctgctgaaattcgatggttgctactgtgacagcctcgaaaacctggcagacggctacaagcatatgtctctcgccctgaataaaaccggtcggccaatcgtatattcctgcgagtggcctctttacatgtggccatttcagaaaccgaactacacagaaattcgccagtattgcaatcattggaggaacttcgctgatatcgatgactcatgggcctccataaagagcatcttggactggaccagtcggaatcaggagcgaattgtggatgtcgcaggccctggaggatggaacgatccagacatgctggtgatcggcaattttggcctctcttgggaccagcaggttacccaaatggctctgtgggcaattatggccggtcctcttttcatgagcaacgatctgcgcgcgatctcaccacaggcaaaggccctgctccaagacaaaagtgtgatagccatcaatcaggacccgttgggaaagcagggctaccagctgagactgggcgacaactttgaggtctgggaaaggcctttgagtggagatgcgtgggctgtggccattattaatcggcaagagatcggaggtccacgcggttatacaattcctgtagcaaagcttggcaagggcgttgcctgtaacccagcttgcttcatcactcagcttctgccggtgaagagaaaactgggtttctacgaagctaccagcaggctccgatcccacatcaaccctacaggaaccgtcctcttgcagctggagaatacgatgcaggcgtcactgaaggacctcctg

SEQ ID NO: 1762 - protein, 398 aa, Artificial Sequence
  variant of human alpha-galactosidase A
LDNGLARTPPMGWLHWERFMCNLDCQEEPDSCISEKLFEEMAERMVTDGWKDAGYEYLCIDDCWMAPQRDSEGRLQADPQRFPKGIRQLANHVHSKGLKLGIYADVGNKTCAGFPGSFGYYDIDAQTFADWGVDLLKFDGCYCDSLENLADGYKHMSLALNKTGRPIVYSCEWPLYMWPFQKPNYTEIRQYCNHWRNFADIDDSWASIKSILDWTSRNQERIVDVAGPGGWNDPDMLVIGNFGLSWDQQVTQMALWAIMAGPLFMSNDLRAISPQAKALLQDKSVIAINQDPLGKQGYQLRLGDNFEVWERPLSGDAWAVAIINRQEIGGPRGYTIPVAKLGKGVACNPACFITQLLPVKRKLGFYEATSRLRSHINPTGTVLLQLENTMQASLKDLL

SEQ ID NO: 1763 - DNA, 1194 bp, Artificial Sequence
  variant of human alpha-galactosidase A
ctggataatggattggctagaacacctcctatggggtggcttcactgggagaggttcatgtgcaacctggactgtcaggaagaaccagacagctgcatctccgagaagctctttgtggaaatggccgaagtgatggtgcgcgacggctggaaagatgcaggttacgagtatctgtgtattgacgattgctggatggccccacaacgggattctgagggaagacttcaggctgatccgcagcgcttccctcatggcataaggcagctggcaaaccacgtccacagtaaggggctcaaattgggaatctacgcggacgtgggcaataagacctgtgccggttttccgggatcattcgggtattatgacattgacgcccaaacgtttgctgattggggcgttgacctgctgaaattcgatggttgctactgtgacagcctcgaaaacctggcagacggctacaagcatatgtctctcgccctgaataaaaccggtcggccaatcgtatattcctgcgagtggcctctttacatgtggccatttcagaaaccgaactacacagaaattcgccagtattgcaatcattggaggaacttcgctgatatcgatgactcatgggcctccataaagagcatcttggactggaccagtcggaatcaggagcgaattgtggatgtcgcaggccctggaggatggaacgatccagacatgctggtgatcggcaattttggcctctcttgggaccagcaggttacccaaatggctctgtgggcaattatggccggccctcttttcatgagcaacgatctgcgcgcgatctcaccacaggcaaaggccctgctccaagacaaagatgtgatagccatcaatcaggacccgttgggaaagcagggctaccagctgagaaaaggcgacaactttgaggtctgggaaaggcctttgagtggagatgcgtgggctgtggccattattaatcggcaagagatcggaggtccacgcggttatacaattcctgtagcaaagcttggcaagggcgttgcctgtaacccagcttgcttcatcactcagcttctgccggtgaagagaaaactgggtttctacgaagctaccagcaggctccgatcccacatcaaccctacaggaaccgtcctcttgcagctggagaatacgatgcagacttcactgaaggacctcctg

SEQ ID NO: 1764 - protein, 398 aa, Artificial Sequence
  variant of human alpha-galactosidase A
LDNGLARTPPMGWLHWERFMCNLDCQEEPDSCISEKLFVEMAEVMVRDGWKDAGYEYLCIDDCWMAPQRDSEGRLQADPQRFPHGIRQLANHVHSKGLKLGIYADVGNKTCAGFPGSFGYYDIDAQTFADWGVDLLKFDGCYCDSLENLADGYKHMSLALNKTGRPIVYSCEWPLYMWPFQKPNYTEIRQYCNHWRNFADIDDSWASIKSILDWTSRNQERIVDVAGPGGWNDPDMLVIGNFGLSWDQQVTQMALWAIMAGPLFMSNDLRAISPQAKALLQDKDVIAINQDPLGKQGYQLRKGDNFEVWERPLSGDAWAVAIINRQEIGGPRGYTIPVAKLGKGVACNPACFITQLLPVKRKLGFYEATSRLRSHINPTGTVLLQLENTMQTSLKDLL

SEQ ID NO: 1765 - DNA, 1194 bp, Artificial Sequence
  variant of human alpha-galactosidase A
ctggataatggattggctagaacacctccaatggggtggcttcactgggagaggttcatgtgcaacctggactgtcaggaagaaccagacagctgcatctccgagaagctctttgaggaaatggccgaacgaatggtgactgacggctggaaagatgcaggttacgagtatctgtgtattgacgattgctggatggccccacaacgggattctgagggaagacttcaggctgatccgcagcgcttccctaaaggcataaggcagctggcaaaccacgtccacagtaaggggctcaaattgggaatctacgcggacgtgggcaataagacctgtgccggttttccgggatcattcgggtattatgacattgacgcccaaacgtttgctgattggggcgttgacctgctgaaattcgatggttgctactgtgacagcctcgaaaacctggcagacggctacaagcatatgtctctcgccctgaataaaaccggtcggccaatcgtatattcctgcgagtggcctctttacatgtggccatttcagaaaccgaactacacagaaattcgccagtattgcaatcattggaggaacttcgctgatatcgatgactcatgggcctccataaagagcatcttggactggaccagtcggaatcaggagcgaattgtggatgtcgcaggccctggaggatggaacgatccagacatgctggtgatcggcaattttggcctctcttgggaccagcaggttacccaaatggctctgtgggcaattatggccggtcctcttttcatgagcaacgatctgcgcgcgatctcaccacaggcaaaggccctgctccaagacaaagatgtgatagccatcaatcaggacccgttgggaaagcagggctaccagctgagaaaaggcgacaactttgaggtctgggaaaggcctttgagtggagatgcgtgggctgtggccattattaatcggcaagagatcggaggtccacgcggttatacaattcctgtagcaaagcttggcaagggcgttgcctgtaacccagcttgcttcatcactcagcttctgccggtgaagagaaaactgggtttctacgaagaaaccagcaggctccgatcccacatcaaccctacaggaaccgtcctcttgcagctggagaatacgatgcaggcgtcactgaaggacctcctg

SEQ ID NO: 1766 - protein, 398 aa, Artificial Sequence
  variant of human alpha-galactosidase A
LDNGLARTPPMGWLHWERFMCNLDCQEEPDSCISEKLFEEMAERMVTDGWKDAGYEYLCIDDCWMAPQRDSEGRLQADPQRFPKGIRQLANHVHSKGLKLGIYADVGNKTCAGFPGSFGYYDIDAQTFADWGVDLLKFDGCYCDSLENLADGYKHMSLALNKTGRPIVYSCEWPLYMWPFQKPNYTEIRQYCNHWRNFADIDDSWASIKSILDWTSRNQERIVDVAGPGGWNDPDMLVIGNFGLSWDQQVTQMALWAIMAGPLFMSNDLRAISPQAKALLQDKDVIAINQDPLGKQGYQLRKGDNFEVWERPLSGDAWAVAIINRQEIGGPRGYTIPVAKLGKGVACNPACFITQLLPVKRKLGFYEETSRLRSHINPTGTVLLQLENTMQASLKDLL

SEQ ID NO: 1767 - DNA, 1194 bp, Artificial Sequence
  variant of human alpha-galactosidase A
ctggataatggattggctagaacacctcctatggggtggcttcactgggagaggttcatgtgcaacctggactgtcaggaagaaccagacagctgcatctccgagaagctctttgaggaaatggccgaacgaatggtgactgacggctggaaagatgcaggttacgagtatctgtgtattgacgattgctggatggccccacaacgggattctgagggaagacttcaggctgatccgcagcgcttccctcatggcataaggcagctggcaaaccacgtccacagtaaggggctcaaattgggaatctacgcggacgtgggcaataagacctgtgccggttttccgggatcattcgggtattatgacattgacgcccaaacgtttgctgattggggcgttgacctgctgaaattcgatggttgctactgtgacagcctcgaaaacctggcagacggctacaagcatatgtctctcgccctgaataaaaccggtcggccaatcgtatattcctgcgagtggcctctttacatgtggccatttcagaaaccgaactacacagaaattcgccagtattgcaatcattggaggaacttcgctgatatcgatgactcatgggcctccataaagagcatcttggactggaccagtcggaatcaggagcgaattgtggatgtcgcaggccctggaggatggaacgatccagacatgctggtgatcggcaattttggcctctcttgggaccagcaggttacccaaatggctctgtgggcaattatggccggtcctcttttcatgagcaacgatctgcgcgcgatctcaccacaggcaaaggccctgctccaagacaaagatgtgatagccatcaatcaggacccgttgggaaagcagggctaccagctgagaaaaggcgacaactttgaggtctgggaaaggcctttgagtggacatgcgtgggctgtggccattattaatcggcaagagatcggaggtccacgcggttatacaattcctgtagcaaagcttggcaagggcgttgcctgtaacccagcttgcttcatcactcagcttctgccggtgaagagaaaactgggtttctacgaagctaccagcaggctccgatcccacatcaaccctacaggaaccgtcctcttgcagctggagaatacgatgcagacttcactgaaggacctcctg

SEQ ID NO: 1768 - protein, 398 aa, Artificial Sequence
  variant of human alpha-galactosidase A
LDNGLARTPPMGWLHWERFMCNLDCQEEPDSCISEKLFEEMAERMVTDGWKDAGYEYLCIDDCWMAPQRDSEGRLQADPQRFPHGIRQLANHVHSKGLKLGIYADVGNKTCAGFPGSFGYYDIDAQTFADWGVDLLKFDGCYCDSLENLADGYKHMSLALNKTGRPIVYSCEWPLYMWPFQKPNYTEIRQYCNHWRNFADIDDSWASIKSILDWTSRNQERIVDVAGPGGWNDPDMLVIGNFGLSWDQQVTQMALWAIMAGPLFMSNDLRAISPQAKALLQDKDVIAINQDPLGKQGYQLRKGDNFEVWERPLSGHAWAVAIINRQEIGGPRGYTIPVAKLGKGVACNPACFITQLLPVKRKLGFYEATSRLRSHINPTGTVLLQLENTMQTSLKDLL

SEQ ID NO: 1769 - DNA, 1194 bp, Artificial Sequence
  variant of human alpha-galactosidase A
ctggataatggattggctagaacacctcctatggggtggcttcactgggagaggttcatgtgcaacctggactgtcaggaagaaccagacacctgcatctccgagaagctctttgaggaaatggccgaacgaatggtgactgacggctggaaagatgcaggttacgagtatctgtgtattgacgattgctggatggccccacaacgggattctgagggaagacttcaggctgatccgcagcgcttccctcatggcataaggcagctggcaaaccacgtccacagtaaggggctcaaattgggaatctacgcggacgtgggcaataagacctgtgccggttttccgggatcattcgggtattatgacattgacgcccaaacgtttgctgattggggcgttgacctgctgaaattcgatggttgctactgtgacagcctcgaaaacctggcagacggctacaagcatatgtctctcgccctgaataaaaccggtcggcctatcgtatattcctgcgagtggcctctttacatgtggccatttcagaaaccgaactacacagaaattcgccagtattgcaatcattggaggaacttcgctgatatcgatgactcatgggcctccataaagagcatcttggactggaccagtcggaatcaggagcgaattgtggatgtcgcaggccctggaggatggaacgatccagacatgctggtgatcggcaattttggcctctcttgggaccagcaggttacccaaatggctctgtgggcaattatggccggccctcttttcatgagcaacgatctgcgcgcgatctcaccacaggcaaaggccctgctccaagacctggccgtgatagccatcaatcaggacccgttgggaaagcagggctaccagctgagaaaaggcgacaactttgaggtctgggaaaggcctttgagtggagatgcgtgggctgtggccattattaatcggcaagagatcggaggtccacgcggttatacaattcctgtagcaaagcttggcaagggcgttgcctgtaacccagcttgcttcatcactcagcttctgccggtgaagagaaaactgggtttctacgaagctaccagcaggctccgatcccacatcaaccctacaggaaccgtcctcttgcagctggagaatacgatgcagacttcactgaaggacctcctg

SEQ ID NO: 1770 - protein, 398 aa, Artificial Sequence
  variant of human alpha-galactosidase A
LDNGLARTPPMGWLHWERFMCNLDCQEEPDTCISEKLFEEMAERMVTDGWKDAGYEYLCIDDCWMAPQRDSEGRLQADPQRFPHGIRQLANHVHSKGLKLGIYADVGNKTCAGFPGSFGYYDIDAQTFADWGVDLLKFDGCYCDSLENLADGYKHMSLALNKTGRPIVYSCEWPLYMWPFQKPNYTEIRQYCNHWRNFADIDDSWASIKSILDWTSRNQERIVDVAGPGGWNDPDMLVIGNFGLSWDQQVTQMALWAIMAGPLFMSNDLRAISPQAKALLQDLAVIAINQDPLGKQGYQLRKGDNFEVWERPLSGDAWAVAIINRQEIGGPRGYTIPVAKLGKGVACNPACFITQLLPVKRKLGFYEATSRLRSHINPTGTVLLQLENTMQTSLKDLL

SEQ ID NO: 1771 - DNA, 1194 bp, Artificial Sequence
  variant of human alpha-galactosidase A
ctggataatggattggctagaacacctcctatggggtggcttcactgggagaggttcatgtgcaacctggactgtcaggaagaaccagacagctgcatctccgagaagctctttgaggaaatggccgaacgaatggtgactgacggctggaaagatgcaggttacgagtatctgtgtattgacgattgctggatggccccacaacgggattctgagggaagacttcaggctgatccgcagcgcttccctcatggcataaggcagctggcaaaccacgtccacagtaaggggctcaaattgggaatctacgcggacgtgggcaataagacctgtgccggttttccgggatcattcgggtattatgacattgacgcccaaacgtttgctgattggggcgttgacctgctgaaattcgatggttgctactgtgacagcctcgaaaacctggcagacggctacaagcatatgtctctcgccctgaataaaaccggtcggccaatcgtatattcctgcgagtggcctctttacatgtggccatttcagaaaccgaactacacagaaattcgccagtattgcaatcattggaggaacttcgctgatatcgatgactcatgggcctccataaagagcatcttggactggaccagtcggaatcaggagcgaattgtggatgtcgcaggccctggaggatggaacgatccagacatgctggtgatcggcaattttggcctctcttgggaccagcaggttacccaaatggctctgtgggcaattatggccggtcctcttttcatgagcaacgatctgcgcaagatctcaccacaggcaaaggccctgctccaagacaaagatgtgatagccatcaatcaggacccgttgggaaagcagggctaccagctgagaaaaggcgacaactttgaggtctgggaaaggcctttgagtggagatgcgtgggctgtggccattattaatcggcaagagatcggaggtccacgcggttatacaattcctgtagcaaagcttggcaagggcgttgcctgtaacccagcttgcttcatcactcagcttctgccggtgaagagaaaactgggtttctacgaagctaccagcaggctccgatcccacatcaaccctacaggaaccgtcctcttgcagctggagaatacgatgcagacttcactgaaggacctcctg

SEQ ID NO: 1772 - protein, 398 aa, Artificial Sequence
  variant of human alpha-galactosidase A
LDNGLARTPPMGWLHWERFMCNLDCQEEPDSCISEKLFEEMAERMVTDGWKDAGYEYLCIDDCWMAPQRDSEGRLQADPQRFPHGIRQLANHVHSKGLKLGIYADVGNKTCAGFPGSFGYYDIDAQTFADWGVDLLKFDGCYCDSLENLADGYKHMSLALNKTGRPIVYSCEWPLYMWPFQKPNYTEIRQYCNHWRNFADIDDSWASIKSILDWTSRNQERIVDVAGPGGWNDPDMLVIGNFGLSWDQQVTQMALWAIMAGPLFMSNDLRKISPQAKALLQDKDVIAINQDPLGKQGYQLRKGDNFEVWERPLSGDAWAVAIINRQEIGGPRGYTIPVAKLGKGVACNPACFITQLLPVKRKLGFYEATSRLRSHINPTGTVLLQLENTMQTSLKDLL

SEQ ID NO: 1773 - DNA, 1194 bp, Artificial Sequence
  variant of human alpha-galactosidase A
ctggataatggattggctagaacacctcctatggggtggcttcactgggagaggttcatgtgcaacctggactgtcaggaagaaccagacagctgcatctccgagaagctctttgaggaaatggccgaacgaatggtgactgacggctggaaagatgcaggttacgagtatctgtgtattgacgattgctggatggccccacaacgggattctgagggaagacttcaggctgatccgcagcgcttccctcatggcataaggcagctggcaaaccacgtccacagtaaggggctcaaattgggaatctacgcggacgtgggcaataagacctgtgccggttttccgggatcattcgggtattatgacattgacgcccaaacgtttgctgattggggcgttgacctgctgaaattcgatggttgctactgtgacagcctcgaaaacctggcagacggctacaagcatatgtctctcgccctgaataaaaccggtcggccaatcgtatattcctgcgagtggcctctttacatgtggccatttcagaaaccgaactacacagaaattcgccagtattgcaatcattggaggaacttcgctgatatcgatgactcatgggcctccataaagagcatcttggactggaccagtcggaatcaggagcgaattgtggatgtcgcaggccctggaggatggaacgatccagacatgctggtgatcggcaattttggcctctcttgggaccagcaggttacccaaatggctctgtgggcaattatggccggtcctcttttcatgagcaacgatctgcgcgcgatctcaccacaggcaaaggccctgctccaagacaaagatgtgatagccatcaatcaggacccgttgggaaagcagggctaccagctgagaaaaggcgacaactttgaggtctgggaaaggcctttgagtggagatgcgtgggctgtggccattattaatcggcaagagatcggaggtccacgcggttatacaattcctgtagcaaagcttggcaagggcgttgcctgtaacccagcttgcttcatcactcagcttctgccggtgaagagaaaactgggtttctacgaagaaaccagcaggctccgatcccacatcaaccctacaggaaccgtcctcttgcagctggagaatacgatgcagtggtcactgaaggacctcctg

SEQ ID NO: 1774 - protein, 398 aa, Artificial Sequence
  variant of human alpha-galactosidase A
LDNGLARTPPMGWLHWERFMCNLDCQEEPDSCISEKLFEEMAERMVTDGWKDAGYEYLCIDDCWMAPQRDSEGRLQADPQRFPHGIRQLANHVHSKGLKLGIYADVGNKTCAGFPGSFGYYDIDAQTFADWGVDLLKFDGCYCDSLENLADGYKHMSLALNKTGRPIVYSCEWPLYMWPFQKPNYTEIRQYCNHWRNFADIDDSWASIKSILDWTSRNQERIVDVAGPGGWNDPDMLVIGNFGLSWDQQVTQMALWAIMAGPLFMSNDLRAISPQAKALLQDKDVIAINQDPLGKQGYQLRKGDNFEVWERPLSGDAWAVAIINRQEIGGPRGYTIPVAKLGKGVACNPACFITQLLPVKRKLGFYEETSRLRSHINPTGTVLLQLENTMQWSLKDLL

SEQ ID NO: 1775 - DNA, 1194 bp, Artificial Sequence
  variant of human alpha-galactosidase A
ctggataatggattggctagaacacctcctatggggtggcttcactgggagaggttcatgtgcaacctggactgtcaggaagaaccagacagctgcatctccgagaagctctttgaggaaatggccgaagtgatggtgactgacggctggaaagatgcaggttacgagtatctgtgtattgacgattgctggatggccccacaacgggattctgagggaagacttcaggctgatccgcagcgcttccctcatggcataaggcagctggcaaaccacgtccacagtaaggggctcaaattgggaatctacgcggacgtgggcaataagacctgtgccggttttccgggatcattcgggtattatgacattgacgcccaaacgtttgctgattggggcgttgacctgctgaaattcgatggttgctactgtgacagcctcgaaaacctggcagacggctacaagcatatgtctctcgccctgaataaaaccggtcggcctatcgtatattcctgcgagtggcctctttacatgtggccatttcagaaaccgaactacacagaaattcgccagtattgcaatcattggaggaacttcgctgatatcgatgactcatgggcctccataaagagcatcttggactggaccagtcggaatcaggagcgaattgtggatgtcgcaggccctggaggatggaacgatccagacatgctggtgatcggcaattttggcctctcttgggaccagcaggttacccaaatggctctgtgggcaattatggccggccctcttttcatgagcaacgatctgcgcgcgatctcaccacaggcaaaggccctgctccaagacaaagatgtgatagccatcaatcaggacccgttgggaaagcagggctaccagctgagaaaaggcgacaactttgaggtctgggaaaggcctttgagtggagatgcgtgggctgtggccattattaatcggcaagagatcggaggtccacgcggttatacaattcctgtagcaaagcttggcaagggcgttgcctgtaacccagcttgcttcatcactcagcttctgccggtgaagagaaaactgggtttctacgaagctaccagcaggctccgatcccacatcaaccctacaggaaccgtcctcttgcagctggagaatacgatgcagacttcactgaaggacctcctg

SEQ ID NO: 1776 - protein, 398 aa, Artificial Sequence
  variant of human alpha-galactosidase A
LDNGLARTPPMGWLHWERFMCNLDCQEEPDSCISEKLFEEMAEVMVTDGWKDAGYEYLCIDDCWMAPQRDSEGRLQADPQRFPHGIRQLANHVHSKGLKLGIYADVGNKTCAGFPGSFGYYDIDAQTFADWGVDLLKFDGCYCDSLENLADGYKHMSLALNKTGRPIVYSCEWPLYMWPFQKPNYTEIRQYCNHWRNFADIDDSWASIKSILDWTSRNQERIVDVAGPGGWNDPDMLVIGNFGLSWDQQVTQMALWAIMAGPLFMSNDLRAISPQAKALLQDKDVIAINQDPLGKQGYQLRKGDNFEVWERPLSGDAWAVAIINRQEIGGPRGYTIPVAKLGKGVACNPACFITQLLPVKRKLGFYEATSRLRSHINPTGTVLLQLENTMQTSLKDLL

SEQ ID NO: 1777 - DNA, 1194 bp, Artificial Sequence
  variant of human alpha-galactosidase A
ctggataatggattggctagaacacctcctatggggtggcttcactgggagaggttcatgtgcaacctggactgtcaggaagaaccagacagctgcatctccgagaagctctttgaggaaatggccgaacgaatggtgactgacggctggaaagatgcaggttacgagtatctgtgtattgacgattgctggatggccccacaacgggattctgagggaagacttcaggctgatccgcagcgcttccctcatggcataaggcagctggcaaaccacgtccacagtaaggggctcaaattgggaatctacgcggacgtgggcaataagacctgtgccggttttccgggatcattcgggtattatgacattgacgcccaaacgtttgctgattggggcgttgacctgctgaaattcgatggttgctactgtgacagcctcgaaaacctggcagacggctacaagcatatgtctctcgccctgaataaaaccggtcggccaatcgtatattcctgcgagtggcctctttacatgtggccatttcagaaaccgaactacacagaaattcgccagtattgcaatcattggaggaacttcgctgatatcgatgactcatggcaatccataaagagcatcttggactggaccagtcggaatcaggagcgaattgtggatgtcgcaggccctggaggatggaacgatccagacatgctggtgatcggcaattttggcctctcttgggaccagcaggttacccaaatggctctgtgggcaattatggccggtcctcttttcatgagcaacgatctgcgcgcgatctcaccacaggcaaaggccctgctccaagacaaagatgtgatagccatcaatcaggacccgttgggaaagcagggctaccagctgagaaaaggcgacaactttgaggtctgggaaaggcctttgagtggagatgcgtgggctgtggccattattaatcggcaagagatcggaggtccacgcggttatacaattccagtagcaaagcttggcaagggcgttgcctgtaacccagcttgcttcatcactcagcttctgccggtgaagagaaaactgggtttctacgaagctaccagcaggctccgatcccacatcaaccctacaggaaccgtcctcttgcagctggagaatacgatgcagacttcactgaaggacctcctg

SEQ ID NO: 1778 - protein, 398 aa, Artificial Sequence
  variant of human alpha-galactosidase A
LDNGLARTPPMGWLHWERFMCNLDCQEEPDSCISEKLFEEMAERMVTDGWKDAGYEYLCIDDCWMAPQRDSEGRLQADPQRFPHGIRQLANHVHSKGLKLGIYADVGNKTCAGFPGSFGYYDIDAQTFADWGVDLLKFDGCYCDSLENLADGYKHMSLALNKTGRPIVYSCEWPLYMWPFQKPNYTEIRQYCNHWRNFADIDDSWQSIKSILDWTSRNQERIVDVAGPGGWNDPDMLVIGNFGLSWDQQVTQMALWAIMAGPLFMSNDLRAISPQAKALLQDKDVIAINQDPLGKQGYQLRKGDNFEVWERPLSGDAWAVAIINRQEIGGPRGYTIPVAKLGKGVACNPACFITQLLPVKRKLGFYEATSRLRSHINPTGTVLLQLENTMQTSLKDLL

SEQ ID NO: 1779 - DNA, 1194 bp, Artificial Sequence
  variant of human alpha-galactosidase A
ctggataatggattggctagaacacctcctatggggtggcttcactgggagaggttcatgtgcaacctggactgtcaggaagaaccagacagctgcatctccgagaagctctttctggaaatggccgaacgaatggtgactgacggctggaaagatgcaggttacgagtatctgtgtattgacgattgctggatggccccacaacgggattctgagggaagacttcaggctgatccgcagcgcttccctcatggcataaggcagctggcaaaccacgtccacagtaaggggctcaaattgggaatctacgcggacgtgggcaataagacctgtgccggttttccgggatcattcgggtattatgacattgacgcccaaacgtttgctgattggggcgttgacctgctgaaattcgatggttgctactgtgacagcctcgaaaacctggcagacggctacaagcatatgtctctcgccctgaataaaaccggtcggccaatcgtatattcctgcgagtggcctctttacatgtggccatttcagaaaccgaactacacagaaattcgccagtattgcaatcattggaggaacttcgctgatatcgatgactcatgggcctccataaagagcatcttggactggaccagtcggaatcaggagcgaattgtggatgtcgcaggccctggaggatggaacgatccagacatgctggtgatcggcaattttggcctctcttgggaccagcaggttacccaaatggctctgtgggcaattatggccggtcctcttttcatgagcaacgatctgcgcgcgatctcaccacaggcaaaggccctgctccaagacaaagatgtgatagccatcaatcaggacccgttgggaaagcagggctaccagctgagaaaaggcgacaactttgaggtctgggaaaggcctttgagtggagatgcgtgggctgtggccattattaatcggcaagagatcggaggtccacgcggttatacaattcctgtagcaaagcttggcaagggcgttgcctgtaacccagcttgcttcatcactcagcttctgccggtgaagagaaaactgggtttctacgaagctaccagcaggctccgatcccacatcaaccctacaggaaccgtcctcttgcagctggagaatacgatgcagacttcactgaaggacctcctg

SEQ ID NO: 1780 - protein, 398 aa, Artificial Sequence
  variant of human alpha-galactosidase A
LDNGLARTPPMGWLHWERFMCNLDCQEEPDSCISEKLFLEMAERMVTDGWKDAGYEYLCIDDCWMAPQRDSEGRLQADPQRFPHGIRQLANHVHSKGLKLGIYADVGNKTCAGFPGSFGYYDIDAQTFADWGVDLLKFDGCYCDSLENLADGYKHMSLALNKTGRPIVYSCEWPLYMWPFQKPNYTEIRQYCNHWRNFADIDDSWASIKSILDWTSRNQERIVDVAGPGGWNDPDMLVIGNFGLSWDQQVTQMALWAIMAGPLFMSNDLRAISPQAKALLQDKDVIAINQDPLGKQGYQLRKGDNFEVWERPLSGDAWAVAIINRQEIGGPRGYTIPVAKLGKGVACNPACFITQLLPVKRKLGFYEATSRLRSHINPTGTVLLQLENTMQTSLKDLL

SEQ ID NO: 1781 - DNA, 1194 bp, Artificial Sequence
  variant of human alpha-galactosidase A
ctggataatggattggctagaacacctccaatggggtggcttcactgggagaggttcatgtgcaacctggactgtcaggaagaaccagacagctgcatctccgagaagctctttgaagaaatggccgaacgaatggtgactgacggctggaaagatgcaggttacgagtatctgtgtattgacgattgctggatggccccacaacgggattctgagggaagacttcaggctgatccgcagcgcttccctaaaggcataaggcagctggcaaaccacgtccacagtaaggggctcaaattgggaatctacgcggacgtgggcaataagacctgtgccggttttccgggatcattcgggtattatgacattgacgcccaaacgtttgctgattggggcgttgacctgctgaaattcgatggttgctactgtgacagcctcgaaaacctggcagacggctacaagcatatgtctctcgccctgaataaaaccggtcggccaatcgtatattcctgcgagtggcctctttacatgtggccatttcagaaaccgaactacacagaaattcgccagtattgcaatcattggaggaacttcgctgatatcgatgactcatgggcctccataaagagcatcttggactggaccagtcggaatcaggagcgaattgtggatgtcgcaggccctggaggatggaacgatccagacatgctggtgatcggcaattttggcctctcttgggaccagcaggttacccaaatggctctgtgggcaattatggccggtcctcttttcatgagcaacgatctgcgcgcgatctcaccacaggcaaaggccctgctccaagacaaagatgtgatagccatcaatcaggacccgttgggaaagcagggctaccagctgagaaaaggcgacaactttgaggtctgggaaaggcctttgagtggacatgcgtgggctgtggccattattaatcggcaagagatcggaggtccacgcggttatacaattcctgtagcaaagcttggcaagggcgttgcctgtaacccagcttgcttcatcactcagcttctgccggtgaagagaaaactgggtttctacgaagctaccagcaggctccgatcccacatcaaccctacaggaaccgtcctcttgcagctggagaatacgatgcagacttcactgaaggacctcctg

SEQ ID NO: 1782 - protein, 398 aa, Artificial Sequence
  variant of human alpha-galactosidase A
LDNGLARTPPMGWLHWERFMCNLDCQEEPDSCISEKLFEEMAERMVTDGWKDAGYEYLCIDDCWMAPQRDSEGRLQADPQRFPKGIRQLANHVHSKGLKLGIYADVGNKTCAGFPGSFGYYDIDAQTFADWGVDLLKFDGCYCDSLENLADGYKHMSLALNKTGRPIVYSCEWPLYMWPFQKPNYTEIRQYCNHWRNFADIDDSWASIKSILDWTSRNQERIVDVAGPGGWNDPDMLVIGNFGLSWDQQVTQMALWAIMAGPLFMSNDLRAISPQAKALLQDKDVIAINQDPLGKQGYQLRKGDNFEVWERPLSGHAWAVAIINRQEIGGPRGYTIPVAKLGKGVACNPACFITQLLPVKRKLGFYEATSRLRSHINPTGTVLLQLENTMQTSLKDLL

SEQ ID NO: 1783 - DNA, 1194 bp, Artificial Sequence
  variant of human alpha-galactosidase A
ctggataatggattggctagaacacctcctatggggtggcttcactgggagaggttcatgtgcaacctggactgtcaggaagaaccagacagctgcatctccgagaagctctttgaggaaatggccgaacgaatggtgactgacggctggaaagatgcaggttacgagtatctgtgtattgacgattgctggatggccccacaacgggattctgagggaagacttcaggctgatccgcagcgcttccctcatggcataaggcagctggcaaacaccgtccacagtaaggggctcaaattgggaatctacgcggacgtgggcaataagacctgtgccggttttccgggatcattcgggtattatgacattgacgcccaaacgtttgctgattggggcgttgacctgctgaaattcgatggttgctactgtgacagcctcgaaaacctggcagacggctacaagcatatgtctctcgccctgaataaaaccggtcggccaatcgtatattcctgcgagtggcctctttacatgtggccatttcagaaaccgaactacacagaaattcgccagtattgcaatcattggaggaacttcgctgatatcgatgactcatgggcctccataaagagcatcttggactggaccagtcggaatcaggagcgaattgtggatgtcgcaggccctggaggatggaacgatccagacatgctggtgatcggcaattttggcctctcttgggaccagcaggttacccaaatggctctgtgggcaattatggccggtcctcttttcatgagcaacgatctgcgcgcgatctcaccacaggcaaaggccctgctccaagacgtcgatgtgatagccatcaatcaggacccgttgggaaagcagggctaccagctgagaaaaggcgacaactttgaggtctgggaaaggcctttgagtggagatgcgtgggctgtggccattattaatcggcaagagatcggaggtccacgcggttatacaattcctgtagcaaagcttggcaagggcgttgcctgtaacccagcttgcttcatcactcagcttctgccggtgaagagaaaactgggtttctacgaagctaccagcaggctccgatcccacatcaaccctacaggaaccgtcctcttgcagctggagaatacgatgcagtggtcactgaaggacctcctg

SEQ ID NO: 1784 - protein, 398 aa, Artificial Sequence
  variant of human alpha-galactosidase A
LDNGLARTPPMGWLHWERFMCNLDCQEEPDSCISEKLFEEMAERMVTDGWKDAGYEYLCIDDCWMAPQRDSEGRLQADPQRFPHGIRQLANTVHSKGLKLGIYADVGNKTCAGFPGSFGYYDIDAQTFADWGVDLLKFDGCYCDSLENLADGYKHMSLALNKTGRPIVYSCEWPLYMWPFQKPNYTEIRQYCNHWRNFADIDDSWASIKSILDWTSRNQERIVDVAGPGGWNDPDMLVIGNFGLSWDQQVTQMALWAIMAGPLFMSNDLRAISPQAKALLQDVDVIAINQDPLGKQGYQLRKGDNFEVWERPLSGDAWAVAIINRQEIGGPRGYTIPVAKLGKGVACNPACFITQLLPVKRKLGFYEATSRLRSHINPTGTVLLQLENTMQWSLKDLL

SEQ ID NO: 1785 - DNA, 1194 bp, Artificial Sequence
  variant of human alpha-galactosidase A
ctggataatggattggctagaacacctcctatggggtggcttcactgggagaggttcatgtgcaacctggactgtcaggaagaaccagacagctgcatctccgagaagctctttgaggaaatggccgaacgtatggtgactgacggctggaaagatgcaggttacgagtatctgtgtattgacgattgctggatggccccacaacgggattctgagggaagacttcaggctgatccgcagcgcttccctcatggcataaggcagctggcaaaccacgtccacagtaaggggctcaaattgggaatctacgcggacgtgggcaataagacctgtgccggttttccgggatcattcgggtattatgacattgacgcccaaacgtttgctgattggggcgttgacctgctgaaattcgatggttgctactgtgacagcctcgaaaacctggcagacggctacaagcatatgtctctcgccctgaataaaaccggtcggcctatcgtatattcctgcgagtggcctctttacatgtggccatttcagaaaccgaactacacagaaattcgccagtattgcaatcattggaggaacttcgctgatatcgatgactcatgggcctccataaagagcatcttggactggaccagtcggaatcaggagcgaattgtggatgtcgcaggccctggaggatggaacgatccagacatgctggtgatcggcaattttggcctctcttgggaccagcaggttacccaaatggctctgtgggcaattatggccggtcctcttttcatgagcaacgatctgcgcgcgatctcaccacaggcaaaggccctgctccaagacctggacgtgatagccatcaatcaggacccgttgggaaagcagggctaccagctgagaaaaggcgacaactttgaggtctgggaaaggcctttgagtggagatgcgtgggctgtggccattattaatcggcaagagatcggaggtccacgcggttatacaattcctgtagcaaagcttggcaagggcgttgcctgtaacccagcttgcttcatcactcagcttctgccggtgaagagaaaactgggtttctacgaagctaccagcaggctccgatcccacatcaaccctacaggaaccgtcctcttgcagctggagaatacgatgcagacttcactgaaggacctcctg

SEQ ID NO: 1786 - protein, 398 aa, Artificial Sequence
  variant of human alpha-galactosidase A
LDNGLARTPPMGWLHWERFMCNLDCQEEPDSCISEKLFEEMAERMVTDGWKDAGYEYLCIDDCWMAPQRDSEGRLQADPQRFPHGIRQLANHVHSKGLKLGIYADVGNKTCAGFPGSFGYYDIDAQTFADWGVDLLKFDGCYCDSLENLADGYKHMSLALNKTGRPIVYSCEWPLYMWPFQKPNYTEIRQYCNHWRNFADIDDSWASIKSILDWTSRNQERIVDVAGPGGWNDPDMLVIGNFGLSWDQQVTQMALWAIMAGPLFMSNDLRAISPQAKALLQDLDVIAINQDPLGKQGYQLRKGDNFEVWERPLSGDAWAVAIINRQEIGGPRGYTIPVAKLGKGVACNPACFITQLLPVKRKLGFYEATSRLRSHINPTGTVLLQLENTMQTSLKDLL

SEQ ID NO: 1787 - DNA, 1194 bp, Artificial Sequence
  variant of human alpha-galactosidase A
ctggataatggattggctagaacacctcctatggggtggcttcactgggagaggttcatgtgcaacctggactgtcaggaagaaccagacagctgcatctccgagaagctctttgaggaaatggccgaacgaatggtgactgacggctggaaagatgcaggttacgagtatctgtgtattgacgattgctggatggccccacaacgggattctgagggaagacttcaggctgatccgcagcgcttccctcatggcataaggcagctggcaaaccacgtccacagtaaggggctcaaattgggaatctacgcggacgtgggcaataagacctgtgccggttttccgggatcattcgggtattatgacattgacgcccaaacgtttgctgattggggcgttgacctgctgaaattcgatggttgctactgtgacagcctcgaaaacctggcagacggctacaagcatatgtctctcgccctgaataaaaccggtcgggatatcgtatattcctgcgagtggcctctttacatgtggccatttcagaaaccgaactacacagaaattcgccagtattgcaatcattggaggaacttcgctgatatcgatgactcatgggcctccataaagagcatcttggactggaccagtcggaatcaggagcgaattgtggatgtcgcaggccctggaggatggaacgatccagacatgctggtgatcggcaattttggcctctcttgggaccagcaggttacccaaatggctctgtgggcaattatggccggtcctcttttcatgagcaacgatctgcgcgcgatctcaccacaggcaaaggccctgctccaagacctggccgtgatagccatcaatcaggacccgttgggaaagcagggctaccagctgagaaaaggcgacaactttgaggtctgggaaaggcctttgagtggagatgcgtgggctgtggccattattaatcggcaagagatcggaggtccacgcggttatacaattcctgtagcaaagcttggcaagggcgttgcctgtaacccagcttgcttcatcactcagcttctgccggtgaagagaaaactgggtttctacgaagctaccagcaggctccgatcccacatcaaccctacaggaaccgtcctcttgcagctggagaatacgatgcagacttcactgaaggacctcctg

SEQ ID NO: 1788 - protein, 398 aa, Artificial Sequence
  variant of human alpha-galactosidase A
LDNGLARTPPMGWLHWERFMCNLDCQEEPDSCISEKLFEEMAERMVTDGWKDAGYEYLCIDDCWMAPQRDSEGRLQADPQRFPHGIRQLANHVHSKGLKLGIYADVGNKTCAGFPGSFGYYDIDAQTFADWGVDLLKFDGCYCDSLENLADGYKHMSLALNKTGRDIVYSCEWPLYMWPFQKPNYTEIRQYCNHWRNFADIDDSWASIKSILDWTSRNQERIVDVAGPGGWNDPDMLVIGNFGLSWDQQVTQMALWAIMAGPLFMSNDLRAISPQAKALLQDLAVIAINQDPLGKQGYQLRKGDNFEVWERPLSGDAWAVAIINRQEIGGPRGYTIPVAKLGKGVACNPACFITQLLPVKRKLGFYEATSRLRSHINPTGTVLLQLENTMQTSLKDLL

SEQ ID NO: 1789 - DNA, 1194 bp, Artificial Sequence
  variant of human alpha-galactosidase A
ctggataatggattggctagaacacctcctatggggtggcttcactgggagaggttcatgtgcaacctggactgtcaggaagaaccagacacctgcatctccgagaagctctttgtggaaatggccgaagtgatggtgactgacggctggaaagatgcaggttacgagtatctgtgtattgacgattgctggatggccccacaacgggattctgagggaagacttcaggctgatccgcagcgcttccctcatggcataaggcagctggcaaaccacgtccacagtaaggggctcaaattgggaatctacgcggacgtgggcaataagacctgtgccggttttccgggatcattcgggtattatgacattgacgcccaaacgtttgctgattggggcgttgacctgctgaaattcgatggttgctactgtgacagcctcgaaaacctggcagacggctacaagcatatgtctctcgccctgaataaaaccggtcgggatatcgtatattcctgcgagtggcctctttacatgtggccatttcagaaaccgaactacacagaaattcgccagtattgcaatcattggaggaacttcgctgatatcgatgactcatgggcctccataaagagcatcttggactggaccagtcggaatcaggagcgaattgtggatgtcgcaggccctggaggatggaacgatccagacatgctggtgatcggcaattttggcctctcttgggaccagcaggttacccaaatggctctgtgggcaattatggccggtcctcttttcatgagcaacgatctgcgcgcgatctcaccacaggcaaaggccctgctccaagacaaagatgtgatagccatcaatcaggacccgttgggaaagcagggctaccagctgagatatggcgacaactttgaggtctgggaaaggcctttgagtggagatgcgtgggctgtggccattattaatcggcaagagatcggaggtccacgcggttatacaattcctgtagcaaagcttggcaagggcgttgcctgtaacccagcttgcttcatcactcagcttctgccggtgaagagaaaactgggtttctacgaagctaccagcaggctccgatcccacatcaaccctacaggaaccgtcctcttgcagctggagaatacgatgcagacttcactgaaggacctcctg

SEQ ID NO: 1790 - protein, 398 aa, Artificial Sequence
  variant of human alpha-galactosidase A
LDNGLARTPPMGWLHWERFMCNLDCQEEPDTCISEKLFVEMAEVMVTDGWKDAGYEYLCIDDCWMAPQRDSEGRLQADPQRFPHGIRQLANHVHSKGLKLGIYADVGNKTCAGFPGSFGYYDIDAQTFADWGVDLLKFDGCYCDSLENLADGYKHMSLALNKTGRDIVYSCEWPLYMWPFQKPNYTEIRQYCNHWRNFADIDDSWASIKSILDWTSRNQERIVDVAGPGGWNDPDMLVIGNFGLSWDQQVTQMALWAIMAGPLFMSNDLRAISPQAKALLQDKDVIAINQDPLGKQGYQLRYGDNFEVWERPLSGDAWAVAIINRQEIGGPRGYTIPVAKLGKGVACNPACFITQLLPVKRKLGFYEATSRLRSHINPTGTVLLQLENTMQTSLKDLL

SEQ ID NO: 1791 - DNA, 1194 bp, Artificial Sequence
  variant of human alpha-galactosidase A
ctggataatggattggctagaacacctcctatggggtggcttcactgggagaggttcatgtgcaacctggactgtcaggaagaaccagacagctgcatctccgagaagctctttgaggaaatggccgaacgaatggtgactgacggctggaaagatgcaggttacgagtatctgtgtattgacgattgctggatggccccacaacgggattctgagggaagacttcaggctgatccgcagcgcttccctcatggcataaggcagctggcaaaccacgtccacagtaaggggctcaaattgggaatctacgcggacgtgggcaataagacctgtgccggttttccgggatcattcgggtattatgacattgacgcccaaacgtttgctgattggggcgttgacctgctgaaattcgatggttgctactgtgacagcctcgaaaacctggcagacggctacaagcatatgtctctcgccctgaataaaaccggtcggccaatcgtatattcctgcgagtggcctctttacatgtggccatttcagaaaccgaactacacagaaattcgccagtattgcaatcattggaggaacttcgctgatatcgatgactcatgggcctccataaagagcatcttggactggaccagtcggaatcaggagcgaattgtggatgtcgcaggccctggaggatggaacgatccagacatgctggtgatcggcaattttggcctctcttgggaccagcaggttacccaaatggctctgtgggcaattatggccggtcctcttttcatgagcaacgatctgcgcgcgatctcaccacaggcaaaggccctgctccaagacaaagatgtgatagccatcaatcaggacccgttgggaaagcagggctaccagctgagaaaaggcgacaactttgaggtctgggaaaggcctttgagtggagatgcgtgggctgtggccattattaatcggcaagagatcggaggtccacgcggttatacaattccagtaaacaagcttggcaagggcgttgcctgtaacccagcttgcttcatcactcagcttctgccggtgaagagaaaactgggtttctacgaagctaccagcaggctccgatcccacatcaaccctacaggaaccgtcctcttgcagctggagaatacgatgcagacttcactgaaggacctcctg

SEQ ID NO: 1792 - protein, 398 aa, Artificial Sequence
  variant of human alpha-galactosidase A
LDNGLARTPPMGWLHWERFMCNLDCQEEPDSCISEKLFEEMAERMVTDGWKDAGYEYLCIDDCWMAPQRDSEGRLQADPQRFPHGIRQLANHVHSKGLKLGIYADVGNKTCAGFPGSFGYYDIDAQTFADWGVDLLKFDGCYCDSLENLADGYKHMSLALNKTGRPIVYSCEWPLYMWPFQKPNYTEIRQYCNHWRNFADIDDSWASIKSILDWTSRNQERIVDVAGPGGWNDPDMLVIGNFGLSWDQQVTQMALWAIMAGPLFMSNDLRAISPQAKALLQDKDVIAINQDPLGKQGYQLRKGDNFEVWERPLSGDAWAVAIINRQEIGGPRGYTIPVNKLGKGVACNPACFITQLLPVKRKLGFYEATSRLRSHINPTGTVLLQLENTMQTSLKDLL

SEQ ID NO: 1793 - DNA, 1194 bp, Artificial Sequence
  variant of human alpha-galactosidase A
ctggataatggattggctagaacacctcctatggggtggcttcactgggagaggttcatgtgcaacctggactgtcaggaagaaccagacagctgcatctccgagaagctctttgaggaaatggccgaacgaatggtgactgacggctggaaagatgcaggttacgagtatctgtgtattgacgattgctggatggccccacaacgggattctgagggaagacttcaggctgatccgcagcgcttccctcatggcataaggcagctggcaaaccacgtccacagtaaggggctcaaattgggaatctacgcggacgtgggcaataagacctgtgccggttttccgggatcattcgggtattatgacattgacgcccaaacgtttgctgattggggcgttgacctgctgaaattcgatggttgctactgtgacagcctcgaaaacctggcagacggctacaagcatatgtctctcgccctgaataaaaccggtcggccaatcgtatattcctgcgagtggcctctttacatgtggccatttcagaaaccgaactacacagaaattcgccagtattgcaatcattggaggaacttcgctgatatcgatgactcatgggcctccataaagagcatcttggactggaccagtcgtaatcaggagcgaattgtggatgtcgcaggccctggaggatggaacgatccagacatgctggtgatcggcaattttggcctctcttgggaccagcaggttacccaaatggctctgtgggcaattatggccggtcctcttttcatgagcaacgatctgcgcgctatctcaccacaggcaaaggccctgctccaagacaaagatgtgatagccatcaatcaggacccgttgggaaagcagggctaccagctgagaaaaggcgacaactttgaggtctgggaaaggcctttgagtggagatgcgtgggctgtggccattattaatcggcaagagatcggaggtccacgcggttgcacaattcctgtagcaaagcttggcaagggcgttgcctgtaacccagcttgcttcatcactcagcttctgccggtgaagagaaaactgggtttctacgaagctaccagcaggctccgatcccacatcaaccctacaggaaccgtcctcttgcagctggagaatacgatgcagacttcactgaaggacctcctg

SEQ ID NO: 1794 - protein, 398 aa, Artificial Sequence
  variant of human alpha-galactosidase A
LDNGLARTPPMGWLHWERFMCNLDCQEEPDSCISEKLFEEMAERMVTDGWKDAGYEYLCIDDCWMAPQRDSEGRLQADPQRFPHGIRQLANHVHSKGLKLGIYADVGNKTCAGFPGSFGYYDIDAQTFADWGVDLLKFDGCYCDSLENLADGYKHMSLALNKTGRPIVYSCEWPLYMWPFQKPNYTEIRQYCNHWRNFADIDDSWASIKSILDWTSRNQERIVDVAGPGGWNDPDMLVIGNFGLSWDQQVTQMALWAIMAGPLFMSNDLRAISPQAKALLQDKDVIAINQDPLGKQGYQLRKGDNFEVWERPLSGDAWAVAIINRQEIGGPRGCTIPVAKLGKGVACNPACFITQLLPVKRKLGFYEATSRLRSHINPTGTVLLQLENTMQTSLKDLL

SEQ ID NO: 1795 - DNA, 1194 bp, Artificial Sequence
  variant of human alpha-galactosidase A
ctggataatggattggctagaacacctcctatggggtggcttcactgggagaggttcatgtgcaacctggactgtcaggaagaaccagacagctgcatctccgagaagctctttctggaaatggccgaacgaatggtgactgacggctggaaagatgcaggttacgagtatctgtgtattgacgattgctggatggccccacaacgggattctgagggaagacttcaggctgatccgcagcgcttccctcatggcataaggcagctggcaaacgtagtccacagtaaggggctcaaattgggaatctacgcggacgtgggcaataagacctgtgccggttttccgggatcattcgggtattatgacattgacgcccaaacgtttgctgattggggcgttgacctgctgaaattcgatggttgctactgtgacagcctcgaaaacctggcagacggctacaagcatatgtctctcgccctgaataaaaccggtcggccaatcgtatattcctgcgagtggcctctttacatgtggccatttcagaaaccgaactacacagaaattcgccagtattgcaatcattggaggaacttcgctgatatcgatgactcatgggcctccataaagagcatcttggactggaccagtcggaatcaggagcgaattgtggatgtcgcaggccctggaggatggaacgatccagacatgctggtgatcggcaattttggcctctcttgggaccagcaggttacccaaatggctctgtgggcaattatggccggtcctcttttcatgagcaacgatctgcgcgcgatctcaccacaggcaaaggccctgctccaagacaaagatgtgatagccatcaatcaggacccgttgggaaagcagggctaccagctgagaaaaggcgacaactttgaggtctgggaaaggcctttgagtggagatgcgtgggctgtggccattattaatcggcaagagatcggaggtccacgcggttatacaattcctgtagcaaagcttggcaagggcgttgcctgtaacccagcttgcttcatcactcagcttctgccggtgaagagaaaactgggtttctacgaagctaccagcaggctccgatcccacatcaaccctacaggaaccgtcctcttgcagctggagaatacgatgcagacttcactgaaggacctcctg

SEQ ID NO: 1796 - protein, 398 aa, Artificial Sequence
  variant of human alpha-galactosidase A
LDNGLARTPPMGWLHWERFMCNLDCQEEPDSCISEKLFLEMAERMVTDGWKDAGYEYLCIDDCWMAPQRDSEGRLQADPQRFPHGIRQLANVVHSKGLKLGIYADVGNKTCAGFPGSFGYYDIDAQTFADWGVDLLKFDGCYCDSLENLADGYKHMSLALNKTGRPIVYSCEWPLYMWPFQKPNYTEIRQYCNHWRNFADIDDSWASIKSILDWTSRNQERIVDVAGPGGWNDPDMLVIGNFGLSWDQQVTQMALWAIMAGPLFMSNDLRAISPQAKALLQDKDVIAINQDPLGKQGYQLRKGDNFEVWERPLSGDAWAVAIINRQEIGGPRGYTIPVAKLGKGVACNPACFITQLLPVKRKLGFYEATSRLRSHINPTGTVLLQLENTMQTSLKDLL

SEQ ID NO: 1797 - DNA, 1194 bp, Artificial Sequence
  variant of human alpha-galactosidase A
ctggataatggattggctagaacacctcctatggggtggcttcactgggagaggttcatgtgcaacctggactgtcaggaagaaccagacagctgcatctccgagaagctctttgaggaaatggccgaacgaatggtgactgacggctggaaagatgcaggttacgagtatctgtgtattgacgattgctggatggccccacaacgggattctgagggaagacttcaggctgatccgcagcgcttccctcatggcataaggcagctggcaaaccacgtccacagtaaggggctcaaattgggaatctacgcggacgtgggcaataagacctgtgccggttttccgggatcattcgggtattatgacattgacgcccaaacgtttgctgattggggcgttgacctgctgaaattcgatggttgctactgtgacagcctcgaaaacctggcagacggctacaagttcatgtctctcgccctgaataaaaccggtcggccaatcgtatattcctgcgagtggcctctttacatgtggccatttcagaaaccgaactacacagaaattcgccagtattgcaatcattggaggaacttcgctgatatcgatgactcatgggcctccataaagagcatcttggactggaccagtcggaatcaggagcgaattgtggatgtcgcaggccctggaggatggaacgatccagacatgctggtgatcggcaattttggcctctcttgggaccagcaggttacccaaatggctctgtgggcaattatggccggtcctcttttcatgagcaacgatctgcgcgcgatctcaccacaggcaaaggccctgctccaagacaaagacgtgatagccatcaatcaggacccgttgggaaagcagggctaccagctgagaaaaggcgacaactttgaggtctgggaaaggcctttgagtggagatgcgtgggctgtggccattattaatcggcaagagatcggaggtccacgcggttatacaattcctgtagcaaagcttggcaagggcgttgcctgtaacccagcttgcttcatcactcagcttctgccggtgaagagaaaactgggtttctacgaagaaaccagcaggctccgatcccacatcaaccctacaggaaccgtcctcttgcagctggagaatacgatgcagacttcactgaaggacctcctg

SEQ ID NO: 1798 - protein, 398 aa, Artificial Sequence
  variant of human alpha-galactosidase A
LDNGLARTPPMGWLHWERFMCNLDCQEEPDSCISEKLFEEMAERMVTDGWKDAGYEYLCIDDCWMAPQRDSEGRLQADPQRFPHGIRQLANHVHSKGLKLGIYADVGNKTCAGFPGSFGYYDIDAQTFADWGVDLLKFDGCYCDSLENLADGYKFMSLALNKTGRPIVYSCEWPLYMWPFQKPNYTEIRQYCNHWRNFADIDDSWASIKSILDWTSRNQERIVDVAGPGGWNDPDMLVIGNFGLSWDQQVTQMALWAIMAGPLFMSNDLRAISPQAKALLQDKDVIAINQDPLGKQGYQLRKGDNFEVWERPLSGDAWAVAIINRQEIGGPRGYTIPVAKLGKGVACNPACFITQLLPVKRKLGFYEETSRLRSHINPTGTVLLQLENTMQTSLKDLL

SEQ ID NO: 1799 - DNA, 1194 bp, Artificial Sequence
  variant of human alpha-galactosidase A
ctggataatggattggctagaacacctccaatggggtggcttcactgggagaggttcatgtgcaacctggactgtcaggaagaaccagacagctgcatctccgagaagctctttgaggaaatggccgaacgaatggtgactgacggctggaaagatgcaggttacgagtatctgtgtattgacgattgctggatggccccacaacgggattctgagggaagacttcaggctgatccgcagcgcttccctcatggcataaggcagctggcaaacgtagtccacagtaaggggctcaaattgggaatctacgcggacgtgggcaataagacctgtgccggttttccgggatcattcgggtattatgacattgacgcccaaacgtttgctgattggggcgttgacctgctgaaattcgatggttgctactgtgacagcctcgaaaacctggcagacggctacaagcatatgtctctcgccctgaataaaaccggtcggccaatcgtatattcctgcgagtggcctctttacatgtggccatttcagaaaccgaactacacagaaattcgccagtattgcaatcattggaggaacttcgctgatatcgatgactcatgggcctccataaagagcatcttggactggaccagtcggaatcaggagcgaattgtggatgtcgcaggccctggaggatggaacgatccagacatgctggtgatcggcaattttggcctctcttgggaccagcaggttacccaaatggctctgtgggcaattatggccggtcctcttttcatgagcaacgatctgcgcgcgatctcaccacaggcaaaggccctgctccaagacaaagatgtgatagccatcaatcaggacccgttgggaaagcagggctaccagctgagaaaaggcgacaactttgaggtctgggaaaggcctttgagtggagatgcgtgggctgtggccattattaatcggcaagagatcggaggtccacgcggttatacaattcctgtagcaaagcttggcaagggcgttgcctgtaacccagcttgcttcatcactcagcttctgccggtgaagagaaaactgggtttctacgaagctaccagcaggctccgatcccacatcaaccctacaggaaccgtcctcttgcagctggagaatacgatgcagacttcactgaaggacctcctg

SEQ ID NO: 1800 - protein, 398 aa, Artificial Sequence
  variant of human alpha-galactosidase A
LDNGLARTPPMGWLHWERFMCNLDCQEEPDSCISEKLFEEMAERMVTDGWKDAGYEYLCIDDCWMAPQRDSEGRLQADPQRFPHGIRQLANVVHSKGLKLGIYADVGNKTCAGFPGSFGYYDIDAQTFADWGVDLLKFDGCYCDSLENLADGYKHMSLALNKTGRPIVYSCEWPLYMWPFQKPNYTEIRQYCNHWRNFADIDDSWASIKSILDWTSRNQERIVDVAGPGGWNDPDMLVIGNFGLSWDQQVTQMALWAIMAGPLFMSNDLRAISPQAKALLQDKDVIAINQDPLGKQGYQLRKGDNFEVWERPLSGDAWAVAIINRQEIGGPRGYTIPVAKLGKGVACNPACFITQLLPVKRKLGFYEATSRLRSHINPTGTVLLQLENTMQTSLKDLL

SEQ ID NO: 1801 - DNA, 1194 bp, Artificial Sequence
  variant of human alpha-galactosidase A
ctggataatggattggctagaacacctcctatggggtggcttcactgggagaggttcatgtgcaacctggactgtcaggaagaaccagacagctgcatctccgagaagctctttgaggaaatggccgaacgaatggtgactgacggctggaaagatgcaggttacgagtatctgtgtattgacgattgctggatggccccacaacgggattctgagggaagacttcaggctgatccgcagcgcttccctcatggcataaggcagctggcaaacgtagtccacagtaaggggctcaaattgggaatctacgcggacgtgggcaataagacctgtgccggttttccgggatcattcgggtattatgacattgacgcccaaacgtttgctgattggggcgttgacctgctgaaattcgatggttgctactgtgacagcctcgaaaacctggcagacggctacaagcatatgtctctcgccctgaataaaaccggtcggccaatcgtatattcctgcgagtggcctctttacatgtggccatttcagaaaccgaactacacagaaattcgccagtattgcaatcattggaggaacttcgctgatatcgatgactcatgggcctccataaagagcatcttggactggaccagtcggaatcaggagcgaattgtggatgtcgcaggccctggaggatggaacgatccagacatgctggtgatcggcaattttggcctctcttgggaccagcaggttacccaaatggctctgtgggcaattatggccggtcctcttttcatgagcaacgatctgcgcgcgatctcaccacaggcaaaggccctgctccaagacaaaagtgtgatagccatcaatcaggacccgttgggaaagcagggctaccagctgagaaaaggcgacaactttgaggtctgggaaaggcctttgagtggagatgcgtgggctgtggccattattaatcggcaagagatcggaggtccacgcggttatacaattcctgtagcaaagcttggcaagggcgttgcctgtaacccagcttgcttcatcactcagcttctgccggtgaagagaaaactgggtttctacgaagctaccagcaggctccgatcccacatcaaccctacaggaaccgtcctcttgcagctggagaatacgatgcagacttcactgaaggacctcctg

SEQ ID NO: 1802 - protein, 398 aa, Artificial Sequence
  variant of human alpha-galactosidase A
LDNGLARTPPMGWLHWERFMCNLDCQEEPDSCISEKLFEEMAERMVTDGWKDAGYEYLCIDDCWMAPQRDSEGRLQADPQRFPHGIRQLANVVHSKGLKLGIYADVGNKTCAGFPGSFGYYDIDAQTFADWGVDLLKFDGCYCDSLENLADGYKHMSLALNKTGRPIVYSCEWPLYMWPFQKPNYTEIRQYCNHWRNFADIDDSWASIKSILDWTSRNQERIVDVAGPGGWNDPDMLVIGNFGLSWDQQVTQMALWAIMAGPLFMSNDLRAISPQAKALLQDKSVIAINQDPLGKQGYQLRKGDNFEVWERPLSGDAWAVAIINRQEIGGPRGYTIPVAKLGKGVACNPACFITQLLPVKRKLGFYEATSRLRSHINPTGTVLLQLENTMQTSLKDLL

SEQ ID NO: 1803 - DNA, 1194 bp, Artificial Sequence
  variant of human alpha-galactosidase A
ctggataatggattggctagaacacctcctatggggtggcttcactgggagaggttcatgtgcaacctggactgtcaggaagaaccagacagctgcatctccgagaagctctttgaggaaatggccgaacgaatggtgactgacggctggaaagatgcaggttacgagtatctgtgtattgacgattgctggatggccccacaacgggattctgagggaagacttcaggctgatccgcagcgcttccctcatggcataaggcagctggcaaaccacgtccacagtaaggggctcaaattgggaatctacgcggacgtgggcaataagacctgtgccggttttccgggatcattcgggtattatgacattgacgcccaaacgtttgctgattggggcgttgacctgctgaaattcgatggttgctactgtgacagcctcgaaaacctggcagacggctacaagcatatgtctctcgccctgaataaaaccggtcggccaatcgtatattcctgcgagtggcctctttacatgtggccatttcagaaaccgaactacacagaaattcgccagtattgcaatcattggaggaacttcgctgatatcgatgactcatgggcctccataaagagcatcttggactggaccagtcggaatcaggagcgaattgtggatgtcgcaggccctggaggatggaacgatccagacatgctggtgatcggcaattttggcctctcttgggaccagcaggttacccaaatggctctgtgggcaattatggccggccctcttttcatgagcaacgatctgcgcgcgatctcaccacaggcaaaggccctgctccaagacaaggaagtgatagccatcaatcaggacccgttgggaaagcagggctaccagctgagaaaaggcgacaactttgaggtctgggaaaggcctttgagtggagatgcgtgggctgtggccattattaatcggcaagagatcggaggtccacgcggttatacaattcctgtagcaaagcttggcaagggcgttgcctgtaacccagcttgcttcatcactcagcttctgccggtgaagagaaaactgggtttctacgaagctaccagcaggctccgatcccacatcaaccctacaggaaccgtcctcttgcagctggagaatacgatgcagacttcactgaaggacctcctg

SEQ ID NO: 1804 - protein, 398 aa, Artificial Sequence
  variant of human alpha-galactosidase A
LDNGLARTPPMGWLHWERFMCNLDCQEEPDSCISEKLFEEMAERMVTDGWKDAGYEYLCIDDCWMAPQRDSEGRLQADPQRFPHGIRQLANHVHSKGLKLGIYADVGNKTCAGFPGSFGYYDIDAQTFADWGVDLLKFDGCYCDSLENLADGYKHMSLALNKTGRPIVYSCEWPLYMWPFQKPNYTEIRQYCNHWRNFADIDDSWASIKSILDWTSRNQERIVDVAGPGGWNDPDMLVIGNFGLSWDQQVTQMALWAIMAGPLFMSNDLRAISPQAKALLQDKEVIAINQDPLGKQGYQLRKGDNFEVWERPLSGDAWAVAIINRQEIGGPRGYTIPVAKLGKGVACNPACFITQLLPVKRKLGFYEATSRLRSHINPTGTVLLQLENTMQTSLKDLL

SEQ ID NO: 1805 - DNA, 1194 bp, Artificial Sequence
  variant of human alpha-galactosidase A
ctggataatggattggctagaacacctcctatggggtggcttcactgggagaggttcatgtgcaacctggactgtcaggaagaaccagacagctgcatctccgagaagctctttgaggaaatggccgaacgaatggtgactgacggctggaaagatgcaggttacgagtatctgtgtattgacgattgctggatggccccacaacgggattctgagggaagacttcaggctgatccgcagcgcttccctcatggcataaggcagctggcaaaccacgtccacagtaaggggctcaaattgggaatctacgcggacgtgggcaataagacctgtgccggttttccgggatcattcgggtattatgacattgacgcccaaacgtttgctgattggggcgttgacctgctgaaattcgatggttgctactgtgacagcctcgaaaacctggcagacggctacaagcatatgtctctcgccctgaataaaaccggtcggccaatcgtatattcctgcgagtggcctctttacatgtggccatttcagaaaccgaactacacagaaattcgccagtattgcaatcattggaggaacttcgctgatatcgatgactcatgggcctccataaagagcatcttggactggaccagtcggaatcaggagcgaattgtggatgtcgcaggccctggaggatggaacgatccagacatgctggtgatcggcaattttggcctctcttgggaccagcaggttacccaaatggctctgtgggcaattatggccggtcctcttttcatgagcaacgatctgcgcgctatctcaccacaggcaaaggccctgctccaagacaaagatgtgatagccatcaatcaggacccgttgggaaagcagggctaccagctgagaaaaggcgacaactttgaggtctgggaaaggcctttgagtggagatgcgtgggctgtggccattattaatcggcaagagatcggaggtccacgcggttatacaattcctgtagcaaagcttggcaagggcgttgcctgtaacccagcttgcttcatcactcagcttctgccggtgaagagaaaactgggtttctacgaagctaccagcaggctccgatcccacatcaaccctacaggaaccgtcctcttgcagctggagaatacgatgcagtggtcactgaaggacctcctg

SEQ ID NO: 1806 - protein, 398 aa, Artificial Sequence
  variant of human alpha-galactosidase A
LDNGLARTPPMGWLHWERFMCNLDCQEEPDSCISEKLFEEMAERMVTDGWKDAGYEYLCIDDCWMAPQRDSEGRLQADPQRFPHGIRQLANHVHSKGLKLGIYADVGNKTCAGFPGSFGYYDIDAQTFADWGVDLLKFDGCYCDSLENLADGYKHMSLALNKTGRPIVYSCEWPLYMWPFQKPNYTEIRQYCNHWRNFADIDDSWASIKSILDWTSRNQERIVDVAGPGGWNDPDMLVIGNFGLSWDQQVTQMALWAIMAGPLFMSNDLRAISPQAKALLQDKDVIAINQDPLGKQGYQLRKGDNFEVWERPLSGDAWAVAIINRQEIGGPRGYTIPVAKLGKGVACNPACFITQLLPVKRKLGFYEATSRLRSHINPTGTVLLQLENTMQWSLKDLL

SEQ ID NO: 1807 - DNA, 1194 bp, Artificial Sequence
  variant of human alpha-galactosidase A
ctggataatggattggctagaacacctcctatggggtggcttcactgggagaggttcatgtgcaacctggactgtcaggaagaaccagacagctgcatctccgagaagctctttgaggaaatggccgaacgaatggtgactgacggctggaaagatgcaggttacgagtatctgtgtattgacgattgctggatggccccacaacgggattctgagggaagacttcaggctgatccgcagcgcttccctcatggcataaggcagctggcaaacgtagtccacagtaaggggctcaaattgggaatctacgcggacgtgggcaataagacctgtgccggttttccgggatcattcgggtattatgacattgacgcccaaacgtttgctgattggggcgttgacctgctgaaattcgatggttgctactgtgacagcctcgaaaacctggcagacggctacaagcatatgtctctcgccctgaataaaaccggtcggccaatcgtatattcctgcgagtggcctctttacatgtggccatttcagaaaccgaactacacagaaattcgccagtattgcaatcattggaggaacttcgctgatatcgatgactcatgggcctccataaagagcatcttggactggaccagtcggaatcaggagcgaattgtggatgtcgcaggccctggaggatggaacgatccagacatgctggtgatcggcaattttggcctctcttgggaccagcaggttacccaaatggctctgtgggcaattatggccggtcctcttttcatgagcaacgatctgcgcgcgatctcaccacaggcaaaggccctgctccaagacaaagatgtgatagccatcaatcaggacccgttgggaaagcagggctaccagctgagaaaaggcgacaactttgaggtctgggaaaggcctttgagtggacatgcgtgggctgtggccattattaatcggcaagagatcggaggtccacgcggttatacaattcctgtagcaaagcttggcaagggcgttgcctgtaacccagcttgcttcatcactcagcttctgccggtgaagagaaaactgggtttctacgaagctaccagcaggctccgatcccacatcaaccctacaggaaccgtcctcttgcagctggagaatacgatgcagacttcactgaaggacctcctg

SEQ ID NO: 1808 - protein, 398 aa, Artificial Sequence
  variant of human alpha-galactosidase A
LDNGLARTPPMGWLHWERFMCNLDCQEEPDSCISEKLFEEMAERMVTDGWKDAGYEYLCIDDCWMAPQRDSEGRLQADPQRFPHGIRQLANVVHSKGLKLGIYADVGNKTCAGFPGSFGYYDIDAQTFADWGVDLLKFDGCYCDSLENLADGYKHMSLALNKTGRPIVYSCEWPLYMWPFQKPNYTEIRQYCNHWRNFADIDDSWASIKSILDWTSRNQERIVDVAGPGGWNDPDMLVIGNFGLSWDQQVTQMALWAIMAGPLFMSNDLRAISPQAKALLQDKDVIAINQDPLGKQGYQLRKGDNFEVWERPLSGHAWAVAIINRQEIGGPRGYTIPVAKLGKGVACNPACFITQLLPVKRKLGFYEATSRLRSHINPTGTVLLQLENTMQTSLKDLL

SEQ ID NO: 1809 - DNA, 1194 bp, Artificial Sequence
  variant of human alpha-galactosidase A
ctggataatggattggctagaacacctcctatggggtggcttcactgggagaggttcatgtgcaacctggactgtcaggaagaaccagacagctgcatctccgagaagctctttgaggaaatggccgaacgaatggtgactgacggctggaaagatgcaggttacgagtatctgtgtattgacgattgctggatggccccacaacgggattctgagggaagacttcaggctgatccgcagcgcttccctcatggcataaggcagctggcaaaccacgtccacagtaaggggctcaaattgggaatctacgcggacgtgggcaataagacctgtgccggttttccgggatcattcgggtattatgacattgacgcccaaacgtttgctgattggggcgttgacctgctgaaattcgatggttgctactgtgacagcctcgaaaacctggcagacggctacaagcatatgtctctcgccctgaataaaaccggtcggccaatcgtatattcctgcgagtggcctctttacatgtggccatttcagaaaccgaactacacagaaattcgccagtattgcaatcattggaggaacttcgctgatatcgatgactcatgggcctccataaagagcatcttggactggaccagtcgtaatcaggagcgaattgtggatgtcgcaggccctggaggatggaacgatccagacatgctggtgatcggcaattttggcctctcttgggaccagcaggttacccaaatggctctgtgggcaattatggccggtcctcttttcatgagcaacgatctgcgcgcgatctcaccacaggcaaaggccctgctccaagaccctgatgtgatagccatcaatcaggacccgttgggaaagcagggctaccagctgagaaaaggcgacaactttgaggtctgggaaaggcctttgagtggagatgcgtgggctgtggccattattaatcggcaagagatcggaggtccacgcggttatacaattcctgtagcaaagcttggcaagggcgttgcctgtaacccagcttgcttcatcactcagcttctgccggtgaagagaaaactgggtttctacgaagctaccagcaggctccgatcccacatcaaccctacaggaaccgtcctcttgcagctggagaatacgatgcagtggtcactgaaggacctcctg

SEQ ID NO: 1810 - protein, 398 aa, Artificial Sequence
  variant of human alpha-galactosidase A
LDNGLARTPPMGWLHWERFMCNLDCQEEPDSCISEKLFEEMAERMVTDGWKDAGYEYLCIDDCWMAPQRDSEGRLQADPQRFPHGIRQLANHVHSKGLKLGIYADVGNKTCAGFPGSFGYYDIDAQTFADWGVDLLKFDGCYCDSLENLADGYKHMSLALNKTGRPIVYSCEWPLYMWPFQKPNYTEIRQYCNHWRNFADIDDSWASIKSILDWTSRNQERIVDVAGPGGWNDPDMLVIGNFGLSWDQQVTQMALWAIMAGPLFMSNDLRAISPQAKALLQDPDVIAINQDPLGKQGYQLRKGDNFEVWERPLSGDAWAVAIINRQEIGGPRGYTIPVAKLGKGVACNPACFITQLLPVKRKLGFYEATSRLRSHINPTGTVLLQLENTMQWSLKDLL

SEQ ID NO: 1811 - DNA, 1194 bp, Artificial Sequence
  variant of human alpha-galactosidase A
ctggataatggattggctagaacacctcctatggggtggcttcactgggagaggttcatgtgcaacctggactgtcaggaagaaccagacagctgcatctccgagaagctctttgaggaaatggccgaacgaatggtgactgacggctggaaagatgcaggttacgagtatctgtgtattgacgattgctggatggccccacaacgggattctgagggaagacttcaggctgatccgcagcgcttccctcatggcataaggcagctggcaaaccacgtccacagtaaggggctcaaattgggaatctacgcggacgtgggcaataagacctgtgccggttttccgggatcattcgggtattatgacattgacgcccaaacgtttgctgattggggcgttgacctgctgaaattcgatggttgctactgtgacagcctcgaaaacctggcagacggctacaagcatatgtctctcgccctgaataaaaccggtcggccaatcgtatattcctgcgagtggcctctttacatgtggccatttcagaaaccgaactacacagaaattcgccagtattgcaatcattggaggaacttcgctgatatcgatgactcatggacctccataaagagcatcttggactggaccagtcgtaatcaggagcgaattgtggatgtcgcaggccctggaggatggaacgatccagacatgctggtgatcggcaattttggcctctcttgggaccagcaggttacccaaatggctctgtgggcaattatggccggtcctcttttcatgagcaacgatctgcgcgcgatctcaccacaggcaaaggccctgctccaagacaaagatgtgatagccatcaatcaggacccgttgggaaagcagggctaccagctgagaaaaggcgacaactttgaggtctgggaaaggcctttgagtggagatgcgtgggctgtggccattattaatcggcaagagatcggaggtccacgcggttgcacaattcctgtagcaaagcttggcaagggcgttgcctgtaacccagcttgcttcatcactcagcttctgccggtgaagagaaaactgggtttctacgaagcaaccagcaggctccgatcccacatcaaccctacaggaaccgtcctcttgcagctggagaatacgatgcagacttcactgaaggacctcctg

SEQ ID NO: 1812 - protein, 398 aa, Artificial Sequence
  variant of human alpha-galactosidase A
LDNGLARTPPMGWLHWERFMCNLDCQEEPDSCISEKLFEEMAERMVTDGWKDAGYEYLCIDDCWMAPQRDSEGRLQADPQRFPHGIRQLANHVHSKGLKLGIYADVGNKTCAGFPGSFGYYDIDAQTFADWGVDLLKFDGCYCDSLENLADGYKHMSLALNKTGRPIVYSCEWPLYMWPFQKPNYTEIRQYCNHWRNFADIDDSWTSIKSILDWTSRNQERIVDVAGPGGWNDPDMLVIGNFGLSWDQQVTQMALWAIMAGPLFMSNDLRAISPQAKALLQDKDVIAINQDPLGKQGYQLRKGDNFEVWERPLSGDAWAVAIINRQEIGGPRGCTIPVAKLGKGVACNPACFITQLLPVKRKLGFYEATSRLRSHINPTGTVLLQLENTMQTSLKDLL

SEQ ID NO: 1813 - DNA, 1194 bp, Artificial Sequence
  variant of human alpha-galactosidase A
ctggataatggattggctagaacacctcctatggggtggcttcactgggagaggttcatgtgcaacctggactgtcaggaagaaccagacagctgcatctccgagaagctctttgaggaaatggccgaacgaatggtgactgacggctggaaagatgcaggttacgagtatctgtgtattgacgattgctggatggccccacaacgggattctgagggaagacttcaggctgatccgcagcgcttccctcatggcataaggcagctggcaaaccacgtccacagtaaggggctcaaattgggaatctacgcggacgtgggcaataagacctgtgccggttttccgggatcattcgggtattatgacattgacgcccaaacgtttgctgattggggcgttgacctgctgaaattcgatggttgctactgtgacagcctcgaaaacctggcagacggctacaagcatatgtctctcgccctgaataaaaccggtcggccaatcgtatattcctgcgagtggcctctttacatgtggccatttcagaaaccgaactacacagaaattcgccagtattgcaatcattggaggaacttcgctgatatcgatgactcatgggcctccataaagagcatcttggactggaccagtcggaatcaggagcgaattgtggatgtcgcaggccctggaggatggaacgatccagacatgctggtgatcggcaattttggcctctcttgggaccagcaggttacccaaatggctctgtgggcaattatggccggtcctcttttcatgagcaacgatctgcgcgcgatctcaccacaggcaaaggccctgctccaagacaaagatgtgatagccatcaatcaggacccgttgggaaagcagggctaccagctgagaaaaggcgacaactttgaggtctgggaaaggcctttgagtggagatgcgtgggctgtggccattattaatcggcaagagatcggaggtccacgcggttatacaattcctgtagcaaagcttggcaagggcgttgcctgtaacccagcttgcttcatcactcagcttctgccggtgaagagaaaactgggtttctacgaagaaaccagcaggctccgatcccacatcaaccctacaggaaccgtcctcttgcagctggagaatacgatgcagacttcactgaaggacctcctg

SEQ ID NO: 1814 - protein, 398 aa, Artificial Sequence
  variant of human alpha-galactosidase A
LDNGLARTPPMGWLHWERFMCNLDCQEEPDSCISEKLFEEMAERMVTDGWKDAGYEYLCIDDCWMAPQRDSEGRLQADPQRFPHGIRQLANHVHSKGLKLGIYADVGNKTCAGFPGSFGYYDIDAQTFADWGVDLLKFDGCYCDSLENLADGYKHMSLALNKTGRPIVYSCEWPLYMWPFQKPNYTEIRQYCNHWRNFADIDDSWASIKSILDWTSRNQERIVDVAGPGGWNDPDMLVIGNFGLSWDQQVTQMALWAIMAGPLFMSNDLRAISPQAKALLQDKDVIAINQDPLGKQGYQLRKGDNFEVWERPLSGDAWAVAIINRQEIGGPRGYTIPVAKLGKGVACNPACFITQLLPVKRKLGFYEETSRLRSHINPTGTVLLQLENTMQTSLKDLL

SEQ ID NO: 1815 - DNA, 1194 bp, Artificial Sequence
  variant of human alpha-galactosidase A
ctggataatggattggctagaacacctcctatggggtggcttcactgggagaggttcatgtgcaacctggactgtcaggaagaaccagacagctgcatctccgagaagctctttgtggaaatggccgaacgtatggtgcgcgacggctggaaagatgcaggttacgagtatctgtgtattgacgattgctggatggccccacaacgggattctgagggaagacttcaggctgatccgcagcgcttccctcatggcataaggcagctggcaaaccacgtccacagtaaggggctcaaattgggaatctacgcggacgtgggcaataagacctgtgccggttttccgggatcattcgggtattatgacattgacgcccaaacgtttgctgattggggcgttgacctgctgaaattcgatggttgctactgtgacagcctcgaaaacctggcagacggctacaagcatatgtctctcgccctgaataaaaccggtcggcctatcgtatattcctgcgagtggcctctttacatgtggccatttcagaaaccgaactacacagaaattcgccagtattgcaatcattggaggaacttcgctgatatcgatgactcatgggcctccataaagagcatcttggactggaccagtcggaatcaggagcgaattgtggatgtcgcaggccctggaggatggaacgatccagacatgctggtgatcggcaattttggcctctcttgggaccagcaggttacccaaatggctctgtgggcaattatggccagccctcttttcatgagcaacgatctgcgcgcgatctcaccacaggcaaaggccctgctccaagacaaagatgtgatagccatcaatcaggacccgttgggaaagcagggctaccagctgagaaaaggcgacaactttgaggtctgggaaaggcctttgagtggagatgcgtgggctgtggccattattaatcggcaagagatcggaggtccacgcggttatacaattcctgtagcaaagcttggcaagggcgttgcctgtaacccagcttgcttcatcactcagcttctgccggtgaagagaaaactgggtttctacgaagctaccagcaggctccgatcccacatcaaccctacaggaaccgtcctcttgcagctggagaatacgatgcagacttcactgaaggacctcctg

SEQ ID NO: 1816 - protein, 398 aa, Artificial Sequence
  variant of human alpha-galactosidase A
LDNGLARTPPMGWLHWERFMCNLDCQEEPDSCISEKLFVEMAERMVRDGWKDAGYEYLCIDDCWMAPQRDSEGRLQADPQRFPHGIRQLANHVHSKGLKLGIYADVGNKTCAGFPGSFGYYDIDAQTFADWGVDLLKFDGCYCDSLENLADGYKHMSLALNKTGRPIVYSCEWPLYMWPFQKPNYTEIRQYCNHWRNFADIDDSWASIKSILDWTSRNQERIVDVAGPGGWNDPDMLVIGNFGLSWDQQVTQMALWAIMASPLFMSNDLRAISPQAKALLQDKDVIAINQDPLGKQGYQLRKGDNFEVWERPLSGDAWAVAIINRQEIGGPRGYTIPVAKLGKGVACNPACFITQLLPVKRKLGFYEATSRLRSHINPTGTVLLQLENTMQTSLKDLL

SEQ ID NO: 1817 - DNA, 1194 bp, Artificial Sequence
  variant of human alpha-galactosidase A
ctggataatggattggctagaacacctcctatggggtggcttcactgggagaggttcatgtgcaacctggactgtcaggaagaaccagacagctgcatctccgagaagctctttgaggaaatggccgaacgaatggtgactgacggctggaaagatgcaggttacgagtatctgtgtattgacgattgctggatggccccacaacgggattctgagggaagacttcaggctgatccgcagcgcttccctcatggcataaggcagctggcaaaccacgtccacagtaaggggctcaaattgggaatctacgcggacgtgggcaataagacctgtgccggttttccgggatcattcgggtattatgacattgacgcccaaacgtttgctgattggggcgttgacctgctgaaattcgatggttgctactgtgacagcctcgaaaacctggcagacggctacaagcatatgtctctcgccctgaataaaaccggtcggccaatcgtatattcctgcgagtggcctctttacatgtggccatttcagaaaccgaactacacagaaattcgccagtattgcaatcattggaggaacttcgctgatatcgatgactcatgggcctccataaagagcatcttggactggaccagtcggaatcaggagcgaattgtggatgtcgcaggccctggaggatggaacgatccagacatgctggtgatcggcaattttggcctctcttgggaccagcaggttacccaaatggctctgtgggcaattatggccggtcctcttttcatgagcaacgatctgcgcgcgatctcaccagcagcaaaggccctgctccaagacaaagacgtgatagccatcaatcaggacccgttgggaaagcagggctaccagctgagaaaaggcgacaactttgaggtctgggaaaggcctttgagtggagatgcgtgggctgtggccattattaatcggcaagagatcggaggtccacgcggttatacaattcctgtagcaaagcttggcaagggcgttgcctgtaacccagcttgcttcatcactcagcttctgccggtgaagagaaaactgggtttctacgaagctaccagcaggctccgatcccacatcaaccctacaggaaccgtcctcttgcagctggagaatacgatgcagacttcactgaaggacctcctg

SEQ ID NO: 1818 - protein, 398 aa, Artificial Sequence
  variant of human alpha-galactosidase A
LDNGLARTPPMGWLHWERFMCNLDCQEEPDSCISEKLFEEMAERMVTDGWKDAGYEYLCIDDCWMAPQRDSEGRLQADPQRFPHGIRQLANHVHSKGLKLGIYADVGNKTCAGFPGSFGYYDIDAQTFADWGVDLLKFDGCYCDSLENLADGYKHMSLALNKTGRPIVYSCEWPLYMWPFQKPNYTEIRQYCNHWRNFADIDDSWASIKSILDWTSRNQERIVDVAGPGGWNDPDMLVIGNFGLSWDQQVTQMALWAIMAGPLFMSNDLRAISPAAKALLQDKDVIAINQDPLGKQGYQLRKGDNFEVWERPLSGDAWAVAIINRQEIGGPRGYTIPVAKLGKGVACNPACFITQLLPVKRKLGFYEATSRLRSHINPTGTVLLQLENTMQTSLKDLL

SEQ ID NO: 1819 - DNA, 1194 bp, Artificial Sequence
  variant of human alpha-galactosidase A
ctggataatggattggctagaacacctcctatggggtggcttcactgggagaggttcatgtgcaacctggactgtcaggaagaaccagacagctgcatctccgagaagctctttgaagaaatggccgaacgaatggtgactgacggctggaaagatgcaggttacgagtatctgtgtattgacgattgctggatggccccacaacgggattctgagggaagacttcaggctgatccgcagcgcttccctcatggcataaggcagctggcaaacgtagtccacagtaaggggctcaaattgggaatctacgcggacgtgggcaataagacctgtgccggttttccgggatcattcgggtattatgacattgacgcccaaacgtttgctgattggggcgttgacctgctgaaattcgatggttgctactgtgacagcctcgaaaacctggcagacggctacaagcatatgtctctcgccctgaataaaaccggtcggccaatcgtatattcctgcgagtggcctctttacatgtggccatttcagaaaccgaactacacagaaattcgccagtattgcaatcattggaggaacttcgctgatatcgatgactcatggtactccataaagagcatcttggactggaccagtcggaatcaggagcgaattgtggatgtcgcaggccctggaggatggaacgatccagacatgctggtgatcggcaattttggcctctcttgggaccagcaggttacccaaatggctctgtgggcaattatggccggtcctcttttcatgagcaacgatctgcgcgcgatctcaccagcagcaaaggccctgctccaagacaaagacgtgatagccatcaatcaggacccgttgggaaagcagggctaccagctgagaaaaggcgacaactttgaggtctgggaaaggcctttgagtggagatgcgtgggctgtggccattattaatcggcaagagatcggaggtccacgcggttatacaattcctgtagcaaagcttggcaagggcgttgcctgtaacccagcttgcttcatcactcagcttctgccggtgaagagaaaactgggtttctacgaagctaccagcaggctccgatcccacatcaaccctacaggaaccgtcctcttgcagctggagaatacgatgcagacttcactgaaggacctcctg

SEQ ID NO: 1820 - protein, 398 aa, Artificial Sequence
  variant of human alpha-galactosidase A
LDNGLARTPPMGWLHWERFMCNLDCQEEPDSCISEKLFEEMAERMVTDGWKDAGYEYLCIDDCWMAPQRDSEGRLQADPQRFPHGIRQLANVVHSKGLKLGIYADVGNKTCAGFPGSFGYYDIDAQTFADWGVDLLKFDGCYCDSLENLADGYKHMSLALNKTGRPIVYSCEWPLYMWPFQKPNYTEIRQYCNHWRNFADIDDSWYSIKSILDWTSRNQERIVDVAGPGGWNDPDMLVIGNFGLSWDQQVTQMALWAIMAGPLFMSNDLRAISPAAKALLQDKDVIAINQDPLGKQGYQLRKGDNFEVWERPLSGDAWAVAIINRQEIGGPRGYTIPVAKLGKGVACNPACFITQLLPVKRKLGFYEATSRLRSHINPTGTVLLQLENTMQTSLKDLL

SEQ ID NO: 1821 - DNA, 1194 bp, Artificial Sequence
  variant of human alpha-galactosidase A
ctggataatggattggctagaacacctggtatggggtggcttcactgggagaggttcatgtgcaacctggactgtcaggaagaaccagacagctgcatctccgagaagctctttgaggaaatggccgaacgaatggtgactgacggctggaaagatgcaggttacgagtatctgtgtattgacgattgctggatggccccacaacgggattctgagggaagacttcaggctgatccgcagcgcttccctcatggcataaggcagctggcaaaccacgtccacagtaaggggctcaaattgggaatctacgcggacgtgggcaataagacctgtgccggttttccgggatcattcgggtattatgacattgacgcccaaacgtttgctgattggggcgttgacctgctgaaattcgatggttgctactgtgacagcctcgaaaacctggcagacggctacaagcatatgtctctcgccctgaataaaaccggtcggccaatcgtatattcctgcgagtggcctctttacatgtggccatttcagaaaccgaactacacagaaattcgccagtattgcaatcattggaggaacttcgctgatatcgatgactcatgggcctccataaagagcatcttggactggaccagtcggaatcaggagcgaattgtggatgtcgcaggccctggaggatggaacgatccagacatgctggtgatcggcaattttggcctctcttgggaccagcaggttacccaaatggctctgtgggcaattatggccggtcctcttttcatgagcaacgatctgcgcgcgatctcaccacaggcaaaggccctgctccaagacaaagatgtgatagccatcaatcaggacccgttgggaaagcagggctaccagctgagaaaaggcgacaactttgaggtctgggaaaggcctttgagtggagatgcgtgggctgtggccattattaatcggcaagagatcggaggtccacgcggttatacaattcctgtagcaaagcttggcaagggcgttgcctgtaacccagcttgcttcatcactcagcttctgccggtgaagagaaaactgggtttctacgaagctaccagcaggctccgatcccacatcaaccctacaggaaccgtcctcttgcagctggagaatacgatgcagacttcactgaaggacctcctg

SEQ ID NO: 1822 - protein, 398 aa, Artificial Sequence
  variant of human alpha-galactosidase A
LDNGLARTPGMGWLHWERFMCNLDCQEEPDSCISEKLFEEMAERMVTDGWKDAGYEYLCIDDCWMAPQRDSEGRLQADPQRFPHGIRQLANHVHSKGLKLGIYADVGNKTCAGFPGSFGYYDIDAQTFADWGVDLLKFDGCYCDSLENLADGYKHMSLALNKTGRPIVYSCEWPLYMWPFQKPNYTEIRQYCNHWRNFADIDDSWASIKSILDWTSRNQERIVDVAGPGGWNDPDMLVIGNFGLSWDQQVTQMALWAIMAGPLFMSNDLRAISPQAKALLQDKDVIAINQDPLGKQGYQLRKGDNFEVWERPLSGDAWAVAIINRQEIGGPRGYTIPVAKLGKGVACNPACFITQLLPVKRKLGFYEATSRLRSHINPTGTVLLQLENTMQTSLKDLL

SEQ ID NO: 1823 - DNA, 1194 bp, Artificial Sequence
  variant of human alpha-galactosidase A
ctggataatggattggctagaacacctcctatggggtggcttcactgggagaggttcatgtgcaacctggactgtcaggaagaaccagacagctgcatctccgagaagctctttgaggaaatggccgaacgaatggtgactgacggctggaaagatgcaggttacgagtatctgtgtattgacgattgctggatggccccacaacgggattctgagggaagacttcaggctgatccgcagcgcttccctcatggcataaggcagctggcaaacaccgtccacagtaaggggctcaaattgggaatctacgcggacgtgggcaataagacctgtgccggttttccgggatcattcgggtattatgacattgacgcccaaacgtttgctgattggggcgttgacctgctgaaattcgatggttgctactgtgacagcctcgaaaacctggcagacggctacaagcatatgtctctcgccctgaataaaaccggtcggccaatcgtatattcctgcgagtggcctctttacatgtggccatttcagaaaccgaactacacagaaattcgccagtattgcaatcattggaggaacttcgctgatatcgatgactcatgggaatccataaagagcatcttggactggaccagtaacaatcaggagcgaattgtggatgtcgcaggccctggaggatggaacgatccagacatgctggtgatcggcaattttggcctctcttgggaccagcaggttacccaaatggctctgtgggcaattatggccggtcctcttttcatgagcaacgatctgcgcgcgatctcaccacaggcaaaggccctgctccaagacaaagatgtgatagccatcaatcaggacccgttgggaaagcagggctaccagctgagaaaaggcgacaactttgaggtctgggaaaggcctttgagtggagatgcgtgggctgtggccattattaatcggcaagagatcggaggtccacgcggttatacaattcctgtagcaaagcttggcaagggcgttgcctgtaacccagcttgcttcatcactcagcttctgccggtgaagagaaaactgggtttctacgaagctaccagcaggctccgatcccacatcaaccctacaggaaccgtcctcttgcagctggagaatacgatgcagacttcactgaaggacctcctg

SEQ ID NO: 1824 - protein, 398 aa, Artificial Sequence
  variant of human alpha-galactosidase A
LDNGLARTPPMGWLHWERFMCNLDCQEEPDSCISEKLFEEMAERMVTDGWKDAGYEYLCIDDCWMAPQRDSEGRLQADPQRFPHGIRQLANTVHSKGLKLGIYADVGNKTCAGFPGSFGYYDIDAQTFADWGVDLLKFDGCYCDSLENLADGYKHMSLALNKTGRPIVYSCEWPLYMWPFQKPNYTEIRQYCNHWRNFADIDDSWESIKSILDWTSNNQERIVDVAGPGGWNDPDMLVIGNFGLSWDQQVTQMALWAIMAGPLFMSNDLRAISPQAKALLQDKDVIAINQDPLGKQGYQLRKGDNFEVWERPLSGDAWAVAIINRQEIGGPRGYTIPVAKLGKGVACNPACFITQLLPVKRKLGFYEATSRLRSHINPTGTVLLQLENTMQTSLKDLL

SEQ ID NO: 1825 - DNA, 1194 bp, Artificial Sequence
  variant of human alpha-galactosidase A
ctggataatggattggctagaacacctcctatggggtggcttcactgggagaggttcatgtgcaacctggactgtcaggaagaaccagacagctgcatctccgagaagctctttgaggaaatggccgaacgaatggtgactgacggctggaaagatgcaggttacgagtatctgtgtattgacgattgctggatggccccacaacgggattctgagggaagacttcaggctgatccgcagcgcttccctcatggcataaggcagctggcaaaccacgtccacagtaaggggctcaaattgggaatctacgcggacgtgggcaataagacctgtgccggttttccgggatcattcgggtattatgacattgacgcccaaacgtttgctgattggggcgttgacctgctgaaattcgatggttgctactgtgacagcctcgaaaacctggcagacggctacaagcatatgtctctcgccctgaataaaaccggtcggccaatcgtatattcctgcgagtggcctctttacatgtggccatttcagaaaccgaactacacagaaattcgccagtattgcaatcattggaggaacttcgctgatatcgatgactcatgggcctccataaagagcatcttggactggaccagtcggaatcaggagcgaattgtggatgtcgcaggccctggaggatggaacgatccagacatgctggtgatcggcaattttggcctctcttgggaccagcaggttacccaaatggctctgtgggcaattatggccggtcctcttttcatgagcaacgatctgcgcgcgatctcaccacaggcaaaggccctgctccaagacaaagatgtgatagccatcaatcaggacccgttgggaaagcagggctaccagctgagaaaaggcgacaactttgaggtctgggaaaggcctttgagtggagatgcgtgggctgtggccattattaatcggcaagagatcggaggtccacgcggttatacaattcctgtagcaaagcttggcaagggcgttgcctgtaacccagcttgcttcatcactcagcttctgccggtgaagagaaaactgggtttctacgaagctaccagcaggctccgatcccacatcaaccctacaggaaccgtcctcttgcagctggagaatacgatgcaggcgtcactgaaggacctcctg

SEQ ID NO: 1826 - protein, 398 aa, Artificial Sequence
  variant of human alpha-galactosidase A
LDNGLARTPPMGWLHWERFMCNLDCQEEPDSCISEKLFEEMAERMVTDGWKDAGYEYLCIDDCWMAPQRDSEGRLQADPQRFPHGIRQLANHVHSKGLKLGIYADVGNKTCAGFPGSFGYYDIDAQTFADWGVDLLKFDGCYCDSLENLADGYKHMSLALNKTGRPIVYSCEWPLYMWPFQKPNYTEIRQYCNHWRNFADIDDSWASIKSILDWTSRNQERIVDVAGPGGWNDPDMLVIGNFGLSWDQQVTQMALWAIMAGPLFMSNDLRAISPQAKALLQDKDVIAINQDPLGKQGYQLRKGDNFEVWERPLSGDAWAVAIINRQEIGGPRGYTIPVAKLGKGVACNPACFITQLLPVKRKLGFYEATSRLRSHINPTGTVLLQLENTMQASLKDLL

SEQ ID NO: 1827 - DNA, 1194 bp, Artificial Sequence
  variant of human alpha-galactosidase A
ctggataatggattggctagaacacctcctatggggtggcttcactgggagaggttcatgtgcaacctggactgtcaggaagaaccagacagctgcatctccgagaagctctttgaggaaatggccgaacgaatggtgactgacggctggaaagatgcaggttacgagtatctgtgtattgacgattgctggatggccccacaacgggattctgagggaagacttcaggctgatccgcagcgcttccctcatggcataaggcagctggcaaaccacgtccacagtaaggggctcaaattgggaatctacgcggacgtgggcaataagacctgtgccggttttccgggatcattcgggtattatgacattgacgcccaaacgtttgctgattggggcgttgacctgctgaaattcgatggttgctactgtgacagcctcgaaaacctggcagacggctacaagcatatgtctctcgccctgaataaaaccggtcggccaatcgtatattcctgcgagtggcctctttacatgtggccatttcagaaaccgaactacacagaaattcgccagtattgcaatcattggaggaacttcgctgatatcgatgactcatgggcctccataaagagcatcttggactggaccagtcggaatcaggagcgaattgtggatgtcgcaggccctggaggatggaacgatccagacatgctggtgatcggcaattttggcctctcttgggaccagcaggttacccaaatggctctgtgggcaattatggccggtcctcttttcatgagcaacgatctgcgcgcgatctcaccacaggcaaaggccctgctccaagacaaagatgtgatagccatcaatcaggacccgttgggaaagcagggctaccagctgagaaaaggcgacaactttgaggtctgggaaaggcctttgagtggagatgcgtgggctgtggccattattaatcggcaagagatcggaggtccacgcggttatacaattcctgtagcaaagcttggcaagggcgttgcctgtaacccagcttgcttcatcactcagcttctgccggtgaagagaaaactgggtttctacgaagctaccagcaggctccgatcccacatcaaccctacaggaaccgtcctcttgcagctggagaatacgatgcaggactcactgaaggacctcctg

SEQ ID NO: 1828 - protein, 398 aa, Artificial Sequence
  variant of human alpha-galactosidase A
LDNGLARTPPMGWLHWERFMCNLDCQEEPDSCISEKLFEEMAERMVTDGWKDAGYEYLCIDDCWMAPQRDSEGRLQADPQRFPHGIRQLANHVHSKGLKLGIYADVGNKTCAGFPGSFGYYDIDAQTFADWGVDLLKFDGCYCDSLENLADGYKHMSLALNKTGRPIVYSCEWPLYMWPFQKPNYTEIRQYCNHWRNFADIDDSWASIKSILDWTSRNQERIVDVAGPGGWNDPDMLVIGNFGLSWDQQVTQMALWAIMAGPLFMSNDLRAISPQAKALLQDKDVIAINQDPLGKQGYQLRKGDNFEVWERPLSGDAWAVAIINRQEIGGPRGYTIPVAKLGKGVACNPACFITQLLPVKRKLGFYEATSRLRSHINPTGTVLLQLENTMQDSLKDLL

SEQ ID NO: 1829 - DNA, 1194 bp, Artificial Sequence
  variant of human alpha-galactosidase A
ctggataatggattggctagaacacctcctatggggtggcttcactgggagaggttcatgtgcaacctggactgtcaggaagaaccagacagctgcatctccgagaagctctttgtggaaatggccgaagtgatggtgactgacggctggaaagatgcaggttacgagtatctgtgtattgacgattgctggatggccccacaacgggattctgagggaagacttcaggctgatccgcagcgcttccctcatggcataaggcagctggcaaaccacgtccacagtaaggggctcaaattgggaatctacgcggacgtgggcaataagacctgtgccggttttccgggatcattcgggtattatgacattgacgcccaaacgtttgctgattggggcgttgacctgctgaaattcgatggttgctactgtgacagcctcgaaaacctggcagacggctacaagcatatgtctctcgccctgaataaaaccggtcggcctatcgtatattcctgcgagtggcctctttacatgtggccatttcagaaaccgaactacacagaaattcgccagtattgcaatcattggaggaacttcgctgatatcgatgactcatgggcctccataaagagcatcttggactggaccagtcggaatcaggagcgaattgtggatgtcgcaggccctggaggatggaacgatccagacatgctggtgatcggcaattttggcctctcttgggaccagcaggttacccaaatggctctgtgggcaattatggccggtcctcttttcatgagcaacgatctgcgcgcgatctcaccacaggcaaaggccctgctccaagacaaagatgtgatagccatcaatcaggacccgttgggaaagcagggctaccagctgagaaaaggcgacaactttgaggtctgggaaaggcctttgagtggagatgcgtgggctgtggccattattaatcggcaagagatcggaggtccacgcggttatacaattccagtaaacaagcttggcaagggcgttgcctgtaacccagcttgcttcatcactcagcttctgccggtgaagagaaaactgggtttctacgaagctaccagcaggctccgatcccacatcaaccctacaggaaccgtcctcttgcagctggagaatacgatgcagacttcactgaaggacctcctg

SEQ ID NO: 1830 - protein, 398 aa, Artificial Sequence
  variant of human alpha-galactosidase A
LDNGLARTPPMGWLHWERFMCNLDCQEEPDSCISEKLFVEMAEVMVTDGWKDAGYEYLCIDDCWMAPQRDSEGRLQADPQRFPHGIRQLANHVHSKGLKLGIYADVGNKTCAGFPGSFGYYDIDAQTFADWGVDLLKFDGCYCDSLENLADGYKHMSLALNKTGRPIVYSCEWPLYMWPFQKPNYTEIRQYCNHWRNFADIDDSWASIKSILDWTSRNQERIVDVAGPGGWNDPDMLVIGNFGLSWDQQVTQMALWAIMAGPLFMSNDLRAISPQAKALLQDKDVIAINQDPLGKQGYQLRKGDNFEVWERPLSGDAWAVAIINRQEIGGPRGYTIPVNKLGKGVACNPACFITQLLPVKRKLGFYEATSRLRSHINPTGTVLLQLENTMQTSLKDLL

SEQ ID NO: 1831 - DNA, 1194 bp, Artificial Sequence
  variant of human alpha-galactosidase A
ctggataatggattggctagaacacctcctatggggtggcttcactgggagaggttcatgtgcaacctggactgtcaggaagaaccagacagctgcatctccgagaagctctttgtggaaatggccgaagtgatggtgactgacggctggaaagatgcaggttacgagtatctgtgtattgacgattgctggatggccccacaacgggattctgagggaagacttcaggctgatccgcagcgcttccctcatggcataaggcagctggcaaaccacgtccacagtaaggggctcaaattgggaatctacgcggacgtgggcaataagacctgtgccggttttccgggatcattcgggtattatgacattgacgcccaaacgtttgctgattggggcgttgacctgctgaaattcgatggttgctactgtgacagcctcgaaaacctggcagacggctacaagcatatgtctctcgccctgaataaaaccggtcggcctatcgtatattcctgcgagtggcctctttacatgtggccatttcagaaaccgaactacacagaaattcgccagtattgcaatcattggaggaacttcgctgatatcgatgactcatgggcctccataaagagcatcttggactggaccagtcggaatcaggagcgaattgtggatgtcgcaggccctggaggatggaacgatccagacatgctggtgatcggcaattttggcctctcttgggaccagcaggttacccaaatggctctgtgggcaattatggccggtcctcttttcatgagcaacgatctgcgcgcgatctcaccacaggcaaaggccctgctccaagacaaagatgtgatagccatcaatcaggacccgttgggaaagcagggctaccagctgagaaaaggcgacaactttgaggtctgggaaaggcctttgagtggagatgcgtgggctgtggccattattaatcggcaagagatcggaggtccacgcggttatacaattcctgtagcaaagcttggcaagggcgttgcctgtaacccagcttgcttcatcactcagcttctgccggtgaagagaaaactgggtttctacgaagctaccagcaggctccgatcccacatcaaccctacaggaaccgtcctcttgcagctggagaatacgatgcagacttcactgaaggacctcctg

SEQ ID NO: 1832 - protein, 398 aa, Artificial Sequence
  variant of human alpha-galactosidase A
LDNGLARTPPMGWLHWERFMCNLDCQEEPDSCISEKLFVEMAEVMVTDGWKDAGYEYLCIDDCWMAPQRDSEGRLQADPQRFPHGIRQLANHVHSKGLKLGIYADVGNKTCAGFPGSFGYYDIDAQTFADWGVDLLKFDGCYCDSLENLADGYKHMSLALNKTGRPIVYSCEWPLYMWPFQKPNYTEIRQYCNHWRNFADIDDSWASIKSILDWTSRNQERIVDVAGPGGWNDPDMLVIGNFGLSWDQQVTQMALWAIMAGPLFMSNDLRAISPQAKALLQDKDVIAINQDPLGKQGYQLRKGDNFEVWERPLSGDAWAVAIINRQEIGGPRGYTIPVAKLGKGVACNPACFITQLLPVKRKLGFYEATSRLRSHINPTGTVLLQLENTMQTSLKDLL

SEQ ID NO: 1833 - DNA, 1194 bp, Artificial Sequence
  variant of human alpha-galactosidase A
ctggataatggattggctagaacacctccaatggggtggcttcactgggagaggttcatgtgcaacctggactgtcaggaagaaccagacagctgcatctccgagaagctctttgaggaaatggccgaacgaatggtgactgacggctggaaagatgcaggttacgagtatctgtgtattgacgattgctggatggccccacaacgggattctgagggaagacttcaggctgatccgcagcgcttccctcatggcataaggcagctggcaaaccacgtccacagtaaggggctcaaattgggaatctacgcggacgtgggcaataagacctgtgccggttttccgggatcattcgggtattatgacattgacgcccaaacgtttgctgattggggcgttgacctgctgaaattcgatggttgctactgtgacagcctcgaaaacctggcagacggctacaagcatatgtctctcgccctgaataaaaccggtcggccaatcgtatattcctgcgagtggcctctttacatgtggccatttcagaaaccgaactacacagaaattcgccagtattgcaatcattggaggaacttcgctgatatcgatgactcatggtactccataaagagcatcttggactggaccagtcggaatcaggagcgaattgtggatgtcgcaggccctggaggatggaacgatccagacatgctggtgatcggcaattttggcctctcttgggaccagcaggttacccaaatggctctgtgggcaattatggccggtcctcttttcatgagcaacgatctgcgcgcgatctcaccacaggcaaaggccctgctccaagacaaagatgtgatagccatcaatcaggacccgttgggaaagcagggctaccagctgagaaaaggcgacaactttgaggtctgggaaaggcctttgagtggagatgcgtgggctgtggccattattaatcggcaagagatcggaggtccacgcggttatacaattcctgtagcaaagcttggcaagggcgttgcctgtaacccagcttgcttcatcactcagcttctgccggtgaagagaaaactgggtttctacgaagctaccagcaggctccgatcccacatcaaccctacaggaaccgtcctcttgcagctggagaatacgatgcagacttcactgaaggacctcctg

SEQ ID NO: 1834 - protein, 398 aa, Artificial Sequence
  variant of human alpha-galactosidase A
LDNGLARTPPMGWLHWERFMCNLDCQEEPDSCISEKLFEEMAERMVTDGWKDAGYEYLCIDDCWMAPQRDSEGRLQADPQRFPHGIRQLANHVHSKGLKLGIYADVGNKTCAGFPGSFGYYDIDAQTFADWGVDLLKFDGCYCDSLENLADGYKHMSLALNKTGRPIVYSCEWPLYMWPFQKPNYTEIRQYCNHWRNFADIDDSWYSIKSILDWTSRNQERIVDVAGPGGWNDPDMLVIGNFGLSWDQQVTQMALWAIMAGPLFMSNDLRAISPQAKALLQDKDVIAINQDPLGKQGYQLRKGDNFEVWERPLSGDAWAVAIINRQEIGGPRGYTIPVAKLGKGVACNPACFITQLLPVKRKLGFYEATSRLRSHINPTGTVLLQLENTMQTSLKDLL

SEQ ID NO: 1835 - DNA, 1194 bp, Artificial Sequence
  variant of human alpha-galactosidase A
ctggataatggattggctagaacacctcctatggggtggcttcactgggagaggttcatgtgcaacctggactgtcaggaagaaccagacagctgcatctccgagaagctctttgaggaaatggccgaacgaatggtgactgacggctggaaagatgcaggttacgagtatctgtgtattgacgattgctggatggccccacaacgggattctgagggaagacttcaggctgatccgcagcgcttccctcatggcataaggcagctggcaaacaccgtccacagtaaggggctcaaattgggaatctacgcggacgtgggcaataagacctgtgccggttttccgggatcattcgggtattatgacattgacgcccaaacgtttgctgattggggcgttgacctgctgaaattcgatggttgctactgtgacagcctcgaaaacctggcagacggctacaagcatatgtctctcgccctgaataaaaccggtcggccaatcgtatattcctgcgagtggcctctttacatgtggccatttcagaaaccgaactacacagaaattcgccagtattgcaatcattggaggaacttcgctgatatcgatgactcatgggcatccataaagagcatcttggactggaccagtcggaatcaggagcgaattgtggatgtcgcaggccctggaggatggaacgatccagacatgctggtgatcggcaattttggcctctcttgggaccagcaggttacccaaatggctctgtgggcaattatggccggtcctcttttcatgagcaacgatctgcgcaagatctcaccacaggcaagggccctgctccaagacaaagatgtgatagccatcaatcaggacccgttgggaaagcagggctaccagctgagaaagggcgacaactttgaggtctgggaaaggcctttgagtggagatgcgtgggctgtggccattattaatcggcaagagatcggaggtccacgcggttatacaattcctgtagcaaagcttggcaagggcgttgcctgtaacccagcttgcttcatcactcagcttctgccggtgaagagaaaactgggtttctacgaagcaaccagcaggctccgatcccacatcaaccctacaggaaccgtcctcttgcagctggagaatacgatgcagacttcactgaaggacctcctg

SEQ ID NO: 1836 - protein, 398 aa, Artificial Sequence
  variant of human alpha-galactosidase A
LDNGLARTPPMGWLHWERFMCNLDCQEEPDSCISEKLFEEMAERMVTDGWKDAGYEYLCIDDCWMAPQRDSEGRLQADPQRFPHGIRQLANTVHSKGLKLGIYADVGNKTCAGFPGSFGYYDIDAQTFADWGVDLLKFDGCYCDSLENLADGYKHMSLALNKTGRPIVYSCEWPLYMWPFQKPNYTEIRQYCNHWRNFADIDDSWASIKSILDWTSRNQERIVDVAGPGGWNDPDMLVIGNFGLSWDQQVTQMALWAIMAGPLFMSNDLRKISPQARALLQDKDVIAINQDPLGKQGYQLRKGDNFEVWERPLSGDAWAVAIINRQEIGGPRGYTIPVAKLGKGVACNPACFITQLLPVKRKLGFYEATSRLRSHINPTGTVLLQLENTMQTSLKDLL

SEQ ID NO: 1837 - DNA, 1194 bp, Artificial Sequence
  variant of human alpha-galactosidase A
ctggataatggattggctagaacacctcctatggggtggcttcactgggagaggttcatgtgcaacctggactgtcaggaagaaccagacagctgcatctccgagaagctctttgaggaaatggccgaacgaatggtgactgacggctggaaagatgcaggttacgagtatctgtgtattgacgattgctggatggccccacaacgggattctgagggaagacttcaggctgatccgcagcgcttccctcatggcataaggcagctggcaaacaccgtccacagtaaggggctcaaattgggaatctacgcggacgtgggcaataagacctgtgccggttttccgggatcattcgggtattatgacattgacgcccaaacgtttgctgattggggcgttgacctgctgaaattcgatggttgctactgtgacagcctcgaaaacctggcagacggctacaagcatatgtctctcgccctgaataaaaccggtcggccaatcgtatattcctgcgagtggcctctttacatgtggccatttcagaaaccgaactacacagaaattcgccagtattgcaatcattggaggaacttcgctgatatcgatgactcatgggaatccataaagagcatcttggactggaccagtcggaatcaggagcgaattgtggatgtcgcaggccctggaggatggaacgatccagacatgctggtgatcggcaattttggcctctcttgggaccagcaggttacccaaatggctctgtgggcaattatggccggtcctcttttcatgagcaacgatctgcgcgctatctcaccacaggcaaaggccctgctccaagacaaagatgtgatagccatcaatcaggacccgttgggaaagcagggctaccagctgagaacgggcgacaactttgaggtctgggaaaggcctttgagtggagatgcgtgggctgtggccattattaatcggcaagagatcggaggtccacgcggttacacaattcctgtagcaaagcttggcaagggcgttgcctgtaacccagcttgcttcatcactcagcttctgccggtgaagagaaaactgggtttctacgaagaaaccagcaggctccgatcccacatcaaccctacaggaaccgtcctcttgcagctggagaatacgatgcagacttcactgaaggacctcctg

SEQ ID NO: 1838 - protein, 398 aa, Artificial Sequence
  variant of human alpha-galactosidase A
LDNGLARTPPMGWLHWERFMCNLDCQEEPDSCISEKLFEEMAERMVTDGWKDAGYEYLCIDDCWMAPQRDSEGRLQADPQRFPHGIRQLANTVHSKGLKLGIYADVGNKTCAGFPGSFGYYDIDAQTFADWGVDLLKFDGCYCDSLENLADGYKHMSLALNKTGRPIVYSCEWPLYMWPFQKPNYTEIRQYCNHWRNFADIDDSWESIKSILDWTSRNQERIVDVAGPGGWNDPDMLVIGNFGLSWDQQVTQMALWAIMAGPLFMSNDLRAISPQAKALLQDKDVIAINQDPLGKQGYQLRTGDNFEVWERPLSGDAWAVAIINRQEIGGPRGYTIPVAKLGKGVACNPACFITQLLPVKRKLGFYEETSRLRSHINPTGTVLLQLENTMQTSLKDLL

SEQ ID NO: 1839 - DNA, 1194 bp, Artificial Sequence
  variant of human alpha-galactosidase A
ctggataatggattggctagaacacctcctatggggtggcttcactgggagaggttcatgtgcaacctggactgtcaggaagaaccagacagctgcatctccgagaagctctttgaggaaatggccgaacgaatggtgactgacggctggaaagatgcaggttacgagtatctgtgtattgacgattgctggatggccccacaacgggattctgagggaagacttcaggctgatccgcagcgcttccctcatggcataaggcagctggcaaaccacgtccacagtaaggggctcaaattgggaatctacgcggacgtgggcaataagacctgtgccggttttccgggatcattcgggtattatgacattgacgcccaaacgtttgctgattggggcgttgacctgctgaaattcgatggttgctactgtgacagcctcgaaaacctggcagacggctacaagcatatgtctctcgccctgaataaaaccggtcggccaatcgtatattcctgcgagtggcctctttacatgtggccatttcagaaaccgaactacacagaaattcgccagtattgcaatcattggaggaacttcgctgatatcgatgactcatgggaatccataaagagcatcttggactggaccagtcggaatcaggagcgaattgtggatgtcgcaggccctggaggatggaacgatccagacatgctggtgatcggcaattttggcctctcttgggaccagcaggttacccaaatggctctgtgggcaattatggccggtcctcttttcatgagcaacgatctgcgcgcgatctcaccacaggcaaaggccctgctccaagacaaagatgtgatagccatcaatcaggacccgttgggaaagcagggctaccagctgagaaaaggcgacaactttgaggtctgggaaaggcctttgagtggagatgcgtgggctgtggccattattaatcggcaagagatcggaggtccacgcggttatacaattcctgtagcaaagcttggcaagggcgttgcctgtaacccagcttgcttcatcactcagcttctgccggtgaagagaaaactgggtttctacgaagctaccagcaggctccgatcccacatcaaccctacaggaaccgtcctcttgcagctggagaatacgatgcagacttcactgaaggacctcctg

SEQ ID NO: 1840 - protein, 398 aa, Artificial Sequence
  variant of human alpha-galactosidase A
LDNGLARTPPMGWLHWERFMCNLDCQEEPDSCISEKLFEEMAERMVTDGWKDAGYEYLCIDDCWMAPQRDSEGRLQADPQRFPHGIRQLANHVHSKGLKLGIYADVGNKTCAGFPGSFGYYDIDAQTFADWGVDLLKFDGCYCDSLENLADGYKHMSLALNKTGRPIVYSCEWPLYMWPFQKPNYTEIRQYCNHWRNFADIDDSWESIKSILDWTSRNQERIVDVAGPGGWNDPDMLVIGNFGLSWDQQVTQMALWAIMAGPLFMSNDLRAISPQAKALLQDKDVIAINQDPLGKQGYQLRKGDNFEVWERPLSGDAWAVAIINRQEIGGPRGYTIPVAKLGKGVACNPACFITQLLPVKRKLGFYEATSRLRSHINPTGTVLLQLENTMQTSLKDLL

SEQ ID NO: 1841 - DNA, 1194 bp, Artificial Sequence
  variant of human alpha-galactosidase A
ctggataatggattggctagaacacctcctatggggtggcttcactgggagaggttcatgtgcaacctggactgtcaggaagaaccagacagctgcatctccgagaagctctttgaggaaatggccgaacgaatggtgactgacggctggaaagatgcaggttacgagtatctgtgtattgacgattgctggatggccccacaacgggattctgagggaagacttcaggctgatccgcagcgcttccctaaaggcataaggcagctggcaaaccacgtccacagtaaggggctcaaattgggaatctacgcggacgtgggcaataagacctgtgccggttttccgggatcattcgggtattatgacattgacgcccaaacgtttgctgattggggcgttgacctgctgaaattcgatggttgctactgtgacagcctcgaaaacctggcagacggctacaagcatatgtctctcgccctgaataaaaccggtcggccaatcgtatattcctgcgagtggcctctttacatgtggccatttcagaaaccgaactacacagaaattcgccagtattgcaatcattggaggaacttcgctgatatcgatgactcatgggcctccataaagagcatcttggactggaccagtcggaatcaggagcgaattgtggatgtcgcaggccctggaggatggaacgatccagacatgctggtgatcggcaattttggcctctcttgggaccagcaggttacccaaatggctctgtgggcaattatggccggtcctcttttcatgagcaacgatctgcgcgcgatctcaccacaggcaaaggccctgctccaagacaaagatgtgatagccatcaatcaggacccgttgggaaagcagggctaccagctgagaaaaggcgacaactttgaggtctgggaaaggcctttgagtggagatgcgtgggctgtggccattattaatcggcaagagatcggaggtccacgcggttatacaattcctgtagcaaagcttggcaagggcgttgcctgtaacccagcttgcttcatcactcagcttctgccggtgaagagaaaactgggtttctacgaagctaccagcaggctccgatcccacatcaaccctacaggaaccgtcctcttgcagctggagaatacgatgcagacttcactgaaggacctcctg

SEQ ID NO: 1842 - protein, 398 aa, Artificial Sequence
  variant of human alpha-galactosidase A
LDNGLARTPPMGWLHWERFMCNLDCQEEPDSCISEKLFEEMAERMVTDGWKDAGYEYLCIDDCWMAPQRDSEGRLQADPQRFPKGIRQLANHVHSKGLKLGIYADVGNKTCAGFPGSFGYYDIDAQTFADWGVDLLKFDGCYCDSLENLADGYKHMSLALNKTGRPIVYSCEWPLYMWPFQKPNYTEIRQYCNHWRNFADIDDSWASIKSILDWTSRNQERIVDVAGPGGWNDPDMLVIGNFGLSWDQQVTQMALWAIMAGPLFMSNDLRAISPQAKALLQDKDVIAINQDPLGKQGYQLRKGDNFEVWERPLSGDAWAVAIINRQEIGGPRGYTIPVAKLGKGVACNPACFITQLLPVKRKLGFYEATSRLRSHINPTGTVLLQLENTMQTSLKDLL

SEQ ID NO: 1843 - DNA, 1194 bp, Artificial Sequence
  variant of human alpha-galactosidase A
ctggataatggattggctagaacacctcctatggggtggcttcactgggagaggttcatgtgcaacctggactgtcaggaagaaccagacagctgcatctccgagaagctctttgaggaaatggccgaacgaatggtgactgacggctggaaagatgcaggttacgagtatctgtgtattgacgattgctggatggccccacaacgggattctgagggaagacttcaggctgatccgcagcgcttccctcatggcataaggcagctggcaaaccacgtccacagtaaggggctcaaattgggaatctacgcggacgtgggcaataagacctgtgccggttttccgggatcattcgggtattatgacattgacgcccaaacgtttgctgattggggcgttgacctgctgaaattcgatggttgctactgtgacagcctcgaaaacctggcagacggctacaagcatatgtctctcgccctgaataaaaccggtcgggatatcgtatattcctgcgagtggcctctttacatgtggccatttcagaaaccgaactacacagaaattcgccagtattgcaatcattggaggaacttcgctgatatcgatgactcatgggcctccataaagagcatcttggactggaccagtcggaatcaggagcgaattgtggatgtcgcaggccctggaggatggaacgatccagacatgctggtgatcggcaattttggcctctcttgggaccagcaggttacccaaatggctctgtgggcaattatggccggtcctcttttcatgagcaacgatctgcgcgcgatctcaccacaggcaaaggccctgctccaagacaaagatgtgatagccatcaatcaggacccgttgggaaagcagggctaccagctgagaaaaggcgacaactttgaggtctgggaaaggcctttgagtggagatgcgtgggctgtggccattattaatcggcaagagatcggaggtccacgcggttatacaattcctgtagcaaagcttggcaagggcgttgcctgtaacccagcttgcttcatcactcagcttctgccggtgaagagaaaactgggtttctacgaagctaccagcaggctccgatcccacatcaaccctacaggaaccgtcctcttgcagctggagaatacgatgcagacttcactgaaggacctcctg

SEQ ID NO: 1844 - protein, 398 aa, Artificial Sequence
  variant of human alpha-galactosidase A
LDNGLARTPPMGWLHWERFMCNLDCQEEPDSCISEKLFEEMAERMVTDGWKDAGYEYLCIDDCWMAPQRDSEGRLQADPQRFPHGIRQLANHVHSKGLKLGIYADVGNKTCAGFPGSFGYYDIDAQTFADWGVDLLKFDGCYCDSLENLADGYKHMSLALNKTGRDIVYSCEWPLYMWPFQKPNYTEIRQYCNHWRNFADIDDSWASIKSILDWTSRNQERIVDVAGPGGWNDPDMLVIGNFGLSWDQQVTQMALWAIMAGPLFMSNDLRAISPQAKALLQDKDVIAINQDPLGKQGYQLRKGDNFEVWERPLSGDAWAVAIINRQEIGGPRGYTIPVAKLGKGVACNPACFITQLLPVKRKLGFYEATSRLRSHINPTGTVLLQLENTMQTSLKDLL

SEQ ID NO: 1845 - DNA, 1194 bp, Artificial Sequence
  variant of human alpha-galactosidase A
ctggataatggattggctagaacacctccaatggggtggcttcactgggagaggttcatgtgcaacctggactgtcaggaagaaccagacagctgcatctccgagaagctctttgaggaaatggccgaacgaatggtgactgacggctggaaagatgcaggttacgagtatctgtgtattgacgattgctggatggccccacaacgggattctgagggaagacttcaggctgatccgcagcgcttccctcatggcataaggcagctggcaaaccacgtccacagtaaggggctcaaattgggaatctacgcggacgtgggcaataagacctgtgccggttttccgggatcattcgggtattatgacattgacgcccaaacgtttgctgattggggcgttgacctgctgaaattcgatggttgctactgtgacagcctcgaaaacctggcagacggctacaagcatatgtctctcgccctgaataaaaccggtcggccaatcgtatattcctgcgagtggcctctttacatgtggccatttcagaaaccgaactacacagaaattcgccagtattgcaatcattggaggaacttcgctgatatcgatgactcatgggaatccataaagagcatcttggactggaccagtaacaatcaggagcgaattgtggatgtcgcaggccctggaggatggaacgatccagacatgctggtgatcggcaattttggcctctcttgggaccagcaggttacccaaatggctctgtgggcaattatggccggtcctcttttcatgagcaacgatctgcgcgcgatctcaccacaggcaaaggccctgctccaagacaaagatgtgatagccatcaatcaggacccgttgggaaagcagggctaccagctgagaaaaggcgacaactttgaggtctgggaaaggcctttgagtggagatgcgtgggctgtggccattattaatcggcaagagatcggaggtccacgcggttatacaattcctgtagcaaagcttggcaagggcgttgcctgtaacccagcttgcttcatcactcagcttctgccggtgaagagaaaactgggtttctacgaagctaccagcaggctccgatcccacatcaaccctacaggaaccgtcctcttgcagctggagaatacgatgcagacttcactgaaggacctcctg

SEQ ID NO: 1846 - protein, 398 aa, Artificial Sequence
  variant of human alpha-galactosidase A
LDNGLARTPPMGWLHWERFMCNLDCQEEPDSCISEKLFEEMAERMVTDGWKDAGYEYLCIDDCWMAPQRDSEGRLQADPQRFPHGIRQLANHVHSKGLKLGIYADVGNKTCAGFPGSFGYYDIDAQTFADWGVDLLKFDGCYCDSLENLADGYKHMSLALNKTGRPIVYSCEWPLYMWPFQKPNYTEIRQYCNHWRNFADIDDSWESIKSILDWTSNNQERIVDVAGPGGWNDPDMLVIGNFGLSWDQQVTQMALWAIMAGPLFMSNDLRAISPQAKALLQDKDVIAINQDPLGKQGYQLRKGDNFEVWERPLSGDAWAVAIINRQEIGGPRGYTIPVAKLGKGVACNPACFITQLLPVKRKLGFYEATSRLRSHINPTGTVLLQLENTMQTSLKDLL

SEQ ID NO: 1847 - DNA, 1194 bp, Artificial Sequence
  variant of human alpha-galactosidase A
ctggataatggattggctagaacacctcctatggggtggcttcactgggagaggttcatgtgcaacctggactgtcaggaagaaccagacagctgcatctccgagaagctctttgaggaaatggccgaacgaatggtgactgacggctggaaagatgcaggttacgagtatctgtgtattgacgattgctggatggccccacaacgggattctgagggaagacttcaggctgatccgcagcgcttccctcatggcataaggcagctggcaaaccacgtccacagtaaggggctcaaattgggaatctacgcggacgtgggcaataagacctgtgccggttttccgggatcattcgggtattatgacattgacgcccaaacgtttgctgattggggcgttgacctgctgaaattcgatggttgctactgtgacagcctcgaaaacctggcagacggctacaagttcatgtctctcgccctgaataaaaccggtcggccaatcgtatattcctgcgagtggcctctttacatgtggccatttcagaaaccgaactacacagaaattcgccagtattgcaatcattggaggaacttcgctgatatcgatgactcatgggcctccataaagagcatcttggactggaccagtattaatcaggagcgaattgtggatgtcgcaggccctggaggatggaacgatccagacatgctggtgatcggcaattttggcctctcttgggaccagcaggttacccaaatggctctgtgggcaattatggccggtcctcttttcatgagcaacgatctgcgcgcgatctcaccacaggcaaaggccctgctccaagacaaagatgtgatagccatcaatcaggacccgttgggaaagcagggctaccagctgagaaaaggcgacaactttgaggtctgggaaaggcctttgagtggagatgcgtgggctgtggccattattaatcggcaagagatcggaggtccacgcggttatacaattcctgtagcaaagcttggcaagggcgttgcctgtaacccagcttgcttcatcactcagcttctgccggtgaagagaaaactgggtttctacgaagctaccagcaggctccgatcccacatcaaccctacaggaaccgtcctcttgcagctggagaatacgatgcagacttcactgaaggacctcctg

SEQ ID NO: 1848 - protein, 398 aa, Artificial Sequence
  variant of human alpha-galactosidase A
LDNGLARTPPMGWLHWERFMCNLDCQEEPDSCISEKLFEEMAERMVTDGWKDAGYEYLCIDDCWMAPQRDSEGRLQADPQRFPHGIRQLANHVHSKGLKLGIYADVGNKTCAGFPGSFGYYDIDAQTFADWGVDLLKFDGCYCDSLENLADGYKFMSLALNKTGRPIVYSCEWPLYMWPFQKPNYTEIRQYCNHWRNFADIDDSWASIKSILDWTSINQERIVDVAGPGGWNDPDMLVIGNFGLSWDQQVTQMALWAIMAGPLFMSNDLRAISPQAKALLQDKDVIAINQDPLGKQGYQLRKGDNFEVWERPLSGDAWAVAIINRQEIGGPRGYTIPVAKLGKGVACNPACFITQLLPVKRKLGFYEATSRLRSHINPTGTVLLQLENTMQTSLKDLL

SEQ ID NO: 1849 - DNA, 1194 bp, Artificial Sequence
  variant of human alpha-galactosidase A
ctggataatggattggctagaacacctggtatggggtggcttcactgggagaggttcatgtgcaacctggactgtcaggaagaaccagacagctgcatctccgagaagctctttgaggaaatggccgaacgaatggtgactgacggctggaaagatgcaggttacgagtatctgtgtattgacgattgctggatggccccacaacgggattctgagggaagacttcaggctgatccgcagcgcttccctcatggcataaggcagctggcaaaccatgtccacagtaaggggctcaaattgggaatctacgcggacgtgggcaataagacctgtgccggttttccgggatcattcgggtattatgacattgacgcccaaacgtttgctgattggggcgttgacctgctgaaattcgatggttgctactgtgacagcctcgaaaacctggcagacggctacaagcatatgtctctcgccctgaataaaaccggtcggccaatcgtatattcctgcgagtggcctctttacatgtggccatttcagaaaccgaactacacagaaattcgccagtattgcaatcattggaggaacttcgctgatatcgatgactcatgggcatccataaagagcatcttggactggaccagtcggaatcaggagcgaattgtggatgtcgcaggccctggaggatggaacgatccagacatgctggtgatcggcaattttggcctctcttgggaccagcaggttacccaaatggctctgtgggcaattatggccggtcctcttttcatgagcaacgatctgcgcgcgatctcaccacaggcaaaggccctgctccaagacaaagatgtgatagccatcaatcaggacccgttgggaaagcagggctaccagctgagaaaaggcgacaactttgaggtctgggaaaggcctttgagtggagatgcgtgggctgtggccattattaatcggcaagagatcggaggtccacgcggttacacaattcctgtagcaaagcttggcaagggcgttgcctgtaacccagcttgcttcatcactcagcttctgccggtgaagagaaaactgggtttctacgaagctaccagcaggctccgatcccacatcaaccctacaggaaccgtcctcttgcagctggagaatacgatgcaggactcactgaaggacctcctg

SEQ ID NO: 1850 - protein, 398 aa, Artificial Sequence
  variant of human alpha-galactosidase A
LDNGLARTPGMGWLHWERFMCNLDCQEEPDSCISEKLFEEMAERMVTDGWKDAGYEYLCIDDCWMAPQRDSEGRLQADPQRFPHGIRQLANHVHSKGLKLGIYADVGNKTCAGFPGSFGYYDIDAQTFADWGVDLLKFDGCYCDSLENLADGYKHMSLALNKTGRPIVYSCEWPLYMWPFQKPNYTEIRQYCNHWRNFADIDDSWASIKSILDWTSRNQERIVDVAGPGGWNDPDMLVIGNFGLSWDQQVTQMALWAIMAGPLFMSNDLRAISPQAKALLQDKDVIAINQDPLGKQGYQLRKGDNFEVWERPLSGDAWAVAIINRQEIGGPRGYTIPVAKLGKGVACNPACFITQLLPVKRKLGFYEATSRLRSHINPTGTVLLQLENTMQDSLKDLL

SEQ ID NO: 1851 - DNA, 1194 bp, Artificial Sequence
  variant of human alpha-galactosidase A
ctggataatggattggctagaacacctcctatggggtggcttcactgggagaggttcatgtgcaacctggactgtcaggaagaaccagacagctgcatctccgagaagctctttctggaaatggccgaacgaatggtgactgacggctggaaagatgcaggttacgagtatctgtgtattgacgattgctggatggccccacaacgggattctgagggaagacttcaggctgatccgcagcgcttccctcatggcataaggcagctggcaaaccacgtccacagtaaggggctcaaattgggaatctacgcggacgtgggcaataagacctgtgccggttttccgggatcattcgggtattatgacattgacgcccaaacgtttgctgattggggcgttgacctgctgaaattcgatggttgctactgtgacagcctcgaaaacctggcagacggctacaagcatatgtctctcgccctgaataaaaccggtcggccaatcgtatattcctgcgagtggcctctttacatgtggccatttcagaaaccgaactacacagaaattcgccagtattgcaatcattggaggaacttcgctgatatcgatgactcatgggaatccataaagagcatcttggactggaccagtcggaatcaggagcgaattgtggatgtcgcaggccctggaggatggaacgatccagacatgctggtgatcggcaattttggcctctcttgggaccagcaggttacccaaatggctctgtgggcaattatggccggtcctcttttcatgagcaacgatctgcgcgcgatctcaccacaggcaaaggccctgctccaagacaaagatgtgatagccatcaatcaggacccgttgggaaagcagggctaccagctgagaaaaggcgacaactttgaggtctgggaaaggcctttgagtggagatgcgtgggctgtggccattattaatcggcaagagatcggaggtccacgcggttatacaattcctgtagcaaagcttggcaagggcgttgcctgtaacccagcttgcttcatcactcagcttctgccggtgaagagaaaactgggtttctacgaagctaccagcaggctccgatcccacatcaaccctacaggaaccgtcctcttgcagctggagaatacgatgcagacttcactgaaggacctcctg

SEQ ID NO: 1852 - protein, 398 aa, Artificial Sequence
  variant of human alpha-galactosidase A
LDNGLARTPPMGWLHWERFMCNLDCQEEPDSCISEKLFLEMAERMVTDGWKDAGYEYLCIDDCWMAPQRDSEGRLQADPQRFPHGIRQLANHVHSKGLKLGIYADVGNKTCAGFPGSFGYYDIDAQTFADWGVDLLKFDGCYCDSLENLADGYKHMSLALNKTGRPIVYSCEWPLYMWPFQKPNYTEIRQYCNHWRNFADIDDSWESIKSILDWTSRNQERIVDVAGPGGWNDPDMLVIGNFGLSWDQQVTQMALWAIMAGPLFMSNDLRAISPQAKALLQDKDVIAINQDPLGKQGYQLRKGDNFEVWERPLSGDAWAVAIINRQEIGGPRGYTIPVAKLGKGVACNPACFITQLLPVKRKLGFYEATSRLRSHINPTGTVLLQLENTMQTSLKDLL

SEQ ID NO: 1853 - DNA, 1194 bp, Artificial Sequence
  variant of human alpha-galactosidase A
ctggataatggattggctagaacacctcctatggggtggcttcactgggagaggttcatgtgcaacctggactgtcaggaagaaccagacagctgcatctccgagaagctctttgaggaaatggccgaacgaatggtgactgacggctggaaagatgcaggttacgagtatctgtgtattgacgattgctggatggccccacaacgggattctgagggaagacttcaggctgatccgcagcgcttccctcatggcataaggcagctggcaaaccacgtccacagtaaggggctcaaattgggaatctacgcggacgtgggcaataagacctgtgccggttttccgggatcattcgggtattatgacattgacgcccaaacgtttgctgattggggcgttgacctgctgaaattcgatggttgctactgtgacagcctcgaaaacctggcagacggctacaagcatatgtctctcgccctgaataaaaccggtcggccaatcgtatattcctgcgagtggcctctttacatgtggccatttcagaaaccgaactacacagaaattcgccagtattgcaatcattggaggaacttcgctgatatcgatgactcatgggcctccataaagagcatcttggactggaccagtcggaatcaggagcgaattgtggatgtcgcaggccctggaggatggaacgatccagacatgctggtgatcggcaattttggcctctcttgggaccagcaggttacccaaatggctctgtgggcaattatggccggtcctcttttcatgagcaacgatctgcgcgcgatctcaccacaggcaaaggccctgctccaagacaaagatgtgatagccatcaatcaggacccgttgggaaagcagggctaccagctgagatatggcgacaactttgaggtctgggaaaggcctttgagtggagatgcgtgggctgtggccattattaatcggcaagagatcggaggtccacgcggttatacaattcctgtagcaaagcttggcaagggcgttgcctgtaacccagcttgcttcatcactcagcttctgccggtgaagagaaaactgggtttctacgaagctaccagcaggctccgatcccacatcaaccctacaggaaccgtcctcttgcagctggagaatacgatgcagacttcactgaaggacctcctg

SEQ ID NO: 1854 - protein, 398 aa, Artificial Sequence
  variant of human alpha-galactosidase A
LDNGLARTPPMGWLHWERFMCNLDCQEEPDSCISEKLFEEMAERMVTDGWKDAGYEYLCIDDCWMAPQRDSEGRLQADPQRFPHGIRQLANHVHSKGLKLGIYADVGNKTCAGFPGSFGYYDIDAQTFADWGVDLLKFDGCYCDSLENLADGYKHMSLALNKTGRPIVYSCEWPLYMWPFQKPNYTEIRQYCNHWRNFADIDDSWASIKSILDWTSRNQERIVDVAGPGGWNDPDMLVIGNFGLSWDQQVTQMALWAIMAGPLFMSNDLRAISPQAKALLQDKDVIAINQDPLGKQGYQLRYGDNFEVWERPLSGDAWAVAIINRQEIGGPRGYTIPVAKLGKGVACNPACFITQLLPVKRKLGFYEATSRLRSHINPTGTVLLQLENTMQTSLKDLL

SEQ ID NO: 1855 - DNA, 1194 bp, Artificial Sequence
  variant of human alpha-galactosidase A
ctggataatggattggctagaacacctcctatggggtggcttcactgggagaggttcatgtgcaacctggactgtcaggaagaaccagacagctgcatctccgagaagctctttgaggaaatggccgaacgaatggtgactgacggctggaaagatgcaggttacgagtatctgtgtattgacgattgctggatggccccacaacgggattctgagggaagacttcaggctgatccgcagcgcttccctcatggcataaggcagctggcaaacgtagtccacagtaaggggctcaaattgggaatctacgcggacgtgggcaataagacctgtgccggttttccgggatcattcgggtattatgacattgacgcccaaacgtttgctgattggggcgttgacctgctgaaattcgatggttgctactgtgacagcctcgaaaacctggcagacggctacaagcatatgtctctcgccctgaataaaaccggtcggccaatcgtatattcctgcgagtggcctctttacatgtggccatttcagaaaccgaactacacagaaattcgccagtattgcaatcattggaggaacttcgctgatatcgatgactcatgggcctccataaagagcatcttggactggaccagtcggaatcaggagcgaattgtggatgtcgcaggccctggaggatggaacgatccagacatgctggtgatcggcaattttggcctctcttgggaccagcaggttacccaaatggctctgtgggcaattatggccggtcctcttttcatgagcaacgatctgcgcgcgatctcaccacaggcaaaggccctgctccaagacaaagatgtgatagccatcaatcaggacccgttgggaaagcagggctaccagctgagactgggcgacaactttgaggtctgggaaaggcctttgagtggagatgcgtgggctgtggccattattaatcggcaagagatcggaggtccacgcggttatacaattcctgtagcaaagcttggcaagggcgttgcctgtaacccagcttgcttcatcactcagcttctgccggtgaagagaaaactgggtttctacgaagctaccagcaggctccgatcccacatcaaccctacaggaaccgtcctcttgcagctggagaatacgatgcagacttcactgaaggacctcctg

SEQ ID NO: 1856 - protein, 398 aa, Artificial Sequence
  variant of human alpha-galactosidase A
LDNGLARTPPMGWLHWERFMCNLDCQEEPDSCISEKLFEEMAERMVTDGWKDAGYEYLCIDDCWMAPQRDSEGRLQADPQRFPHGIRQLANVVHSKGLKLGIYADVGNKTCAGFPGSFGYYDIDAQTFADWGVDLLKFDGCYCDSLENLADGYKHMSLALNKTGRPIVYSCEWPLYMWPFQKPNYTEIRQYCNHWRNFADIDDSWASIKSILDWTSRNQERIVDVAGPGGWNDPDMLVIGNFGLSWDQQVTQMALWAIMAGPLFMSNDLRAISPQAKALLQDKDVIAINQDPLGKQGYQLRLGDNFEVWERPLSGDAWAVAIINRQEIGGPRGYTIPVAKLGKGVACNPACFITQLLPVKRKLGFYEATSRLRSHINPTGTVLLQLENTMQTSLKDLL

SEQ ID NO: 1857 - DNA, 1194 bp, Artificial Sequence
  variant of human alpha-galactosidase A
ctggataatggattggctagaacacctccaatggggtggcttcactgggagaggttcatgtgcaacctggactgtcaggaagaaccagacagctgcatctccgagaagctctttgaggaaatggccgaacgaatggtgactgacggctggaaagatgcaggttacgagtatctgtgtattgacgattgctggatggccccacaacgggattctgagggaagacttcaggctgatccgcagcgcttccctcatggcataaggcagctggcaaacaccgtccacagtaaggggctcaaattgggaatctacgcggacgtgggcaataagacctgtgccggttttccgggatcattcgggtattatgacattgacgcccaaacgtttgctgattggggcgttgacctgctgaaattcgatggttgctactgtgacagcctcgaaaacctggcagacggctacaagcatatgtctctcgccctgaataaaaccggtcggccaatcgtatattcctgcgagtggcctctttacatgtggccatttcagaaaccgaactacacagaaattcgccagtattgcaatcattggaggaacttcgctgatatcgatgactcatgggcatccataaagagcatcttggactggaccagtcgtaatcaggagcgaattgtggatgtcgcaggccctggaggatggaacgatccagacatgctggtgatcggcaattttggcctctcttgggaccagcaggttacccaaatggctctgtgggcaattatggccggtcctcttttcatgagcaacgatctgcgcgctatctcaccacaggcaaaggccctgctccaagacaaagatgtgatagccatcaatcaggacccgttgggaaagcagggctaccagctgagactgggcgacaactttgaggtctgggaaaggcctttgagtggagatgcgtgggctgtggccattattaatcggcaagagatcggaggtccacgcggttatacaattcctgtagcaaagcttggcaagggcgttgcctgtaacccagcttgcttcatcactcagcttctgccggtgaagagaaaactgggtttctacgaagctaccagcaggctccgatcccacatcaaccctacaggaaccgtcctcttgcagctggagaatacgatgcagacttcactgaaggacctcctg

SEQ ID NO: 1858 - protein, 398 aa, Artificial Sequence
  variant of human alpha-galactosidase A
LDNGLARTPPMGWLHWERFMCNLDCQEEPDSCISEKLFEEMAERMVTDGWKDAGYEYLCIDDCWMAPQRDSEGRLQADPQRFPHGIRQLANTVHSKGLKLGIYADVGNKTCAGFPGSFGYYDIDAQTFADWGVDLLKFDGCYCDSLENLADGYKHMSLALNKTGRPIVYSCEWPLYMWPFQKPNYTEIRQYCNHWRNFADIDDSWASIKSILDWTSRNQERIVDVAGPGGWNDPDMLVIGNFGLSWDQQVTQMALWAIMAGPLFMSNDLRAISPQAKALLQDKDVIAINQDPLGKQGYQLRLGDNFEVWERPLSGDAWAVAIINRQEIGGPRGYTIPVAKLGKGVACNPACFITQLLPVKRKLGFYEATSRLRSHINPTGTVLLQLENTMQTSLKDLL

SEQ ID NO: 1859 - DNA, 1194 bp, Artificial Sequence
  variant of human alpha-galactosidase A
ctggataatggattggctagaacacctcctatggggtggcttcactgggagaggttcatgtgcaacctggactgtcaggaagaaccagacagctgcatctccgagaagctctttgaggaaatggccgaacgaatggtgactgacggctggaaagatgcaggttacgagtatctgtgtattgacgattgctggatggccccacaacgggattctgagggaagacttcaggctgatccgcagcgcttccctcatggcataaggcagctggcaaaccacgtccacagtaaggggctcaaattgggaatctacgcggacgtgggcaataagacctgtgccggttttccgggatcattcgggtattatgacattgacgcccaaacgtttgctgattggggcgttgacctgctgaaattcgatggttgctactgtgacagcctcgaaaacctggcagacggctacaagcatatgtctctcgccctgaataaaaccggtcgggatatcgtatattcctgcgagtggcctctttacatgtggccatttcagaaaccgaactacacagaaattcgccagtattgcaatcattggaggaacttcgctgatatcgatgactcatgggcctccataaagagcatcttggactggaccagtcggaatcaggagcgaattgtggatgtcgcaggccctggaggatggaacgatccagacatgctggtgatcggcaattttggcctctcttgggaccagcaggttacccaaatggctctgtgggcaattatggccggtcctcttttcatgagcaacgatctgcgcgcgatctcaccacaggcaaaggccctgctccaagacaaagatgtgatagccatcaatcaggacccgttgggaaagcagggctaccagctgagatatggcgacaactttgaggtctgggaaaggcctttgagtggagatgcgtgggctgtggccattattaatcggcaagagatcggaggtccacgcggttatacaattcctgtagcaaagcttggcaagggcgttgcctgtaacccagcttgcttcatcactcagcttctgccggtgaagagaaaactgggtttctacgaagctaccagcaggctccgatcccacatcaaccctacaggaaccgtcctcttgcagctggagaatacgatgcagacttcactgaaggacctcctg

SEQ ID NO: 1860 - protein, 398 aa, Artificial Sequence
  variant of human alpha-galactosidase A
LDNGLARTPPMGWLHWERFMCNLDCQEEPDSCISEKLFEEMAERMVTDGWKDAGYEYLCIDDCWMAPQRDSEGRLQADPQRFPHGIRQLANHVHSKGLKLGIYADVGNKTCAGFPGSFGYYDIDAQTFADWGVDLLKFDGCYCDSLENLADGYKHMSLALNKTGRDIVYSCEWPLYMWPFQKPNYTEIRQYCNHWRNFADIDDSWASIKSILDWTSRNQERIVDVAGPGGWNDPDMLVIGNFGLSWDQQVTQMALWAIMAGPLFMSNDLRAISPQAKALLQDKDVIAINQDPLGKQGYQLRYGDNFEVWERPLSGDAWAVAIINRQEIGGPRGYTIPVAKLGKGVACNPACFITQLLPVKRKLGFYEATSRLRSHINPTGTVLLQLENTMQTSLKDLL

SEQ ID NO: 1861 - DNA, 1194 bp, Artificial Sequence
  variant of human alpha-galactosidase A
ctggataatggattggctagaacacctcctatggggtggcttcactgggagaggttcatgtgcaacctggactgtcaggaagaaccagacagctgcatctccgagaagctctttgaggaaatggccgaagtgatggtgactgacggctggaaagatgcaggttacgagtatctgtgtattgacgattgctggatggccccacaacgggattctgagggaagacttcaggctgatccgcagcgcttccctcatggcataaggcagctggcaaaccacgtccacagtaaggggctcaaattgggaatctacgcggacgtgggcaataagacctgtgccggttttccgggatcattcgggtattatgacattgacgcccaaacgtttgctgattggggcgttgacctgctgaaattcgatggttgctactgtgacagcctcgaaaacctggcagacggctacaagcatatgtctctcgccctgaataaaaccggtcggcctatcgtatattcctgcgagtggcctctttacatgtggccatttcagaaaccgaactacacagaaattcgccagtattgcaatcattggaggaacttcgctgatatcgatgactcatgggcctccataaagagcatcttggactggaccagtcggaatcaggagcgaattgtggatgtcgcaggccctggaggatggaacgatccagacatgctggtgatcggcaattttggcctctcttgggaccagcaggttacccaaatggctctgtgggcaattatggccggccctcttttcatgagcaacgatctgcgcgcgatctcaccacaggcaaaggccctgctccaagacaaggaagtgatagccatcaatcaggacccgttgggaaagcagggctaccagctgagatatggcgacaactttgaggtctgggaaaggcctttgagtggagatgcgtgggctgtggccattattaatcggcaagagatcggaggtccacgcggttatacaattcctgtagcaaagcttggcaagggcgttgcctgtaacccagcttgcttcatcactcagcttctgccggtgaagagaaaactgggtttctacgaagctaccagcaggctccgatcccacatcaaccctacaggaaccgtcctcttgcagctggagaatacgatgcagacttcactgaaggacctcctg

SEQ ID NO: 1862 - protein, 398 aa, Artificial Sequence
  variant of human alpha-galactosidase A
LDNGLARTPPMGWLHWERFMCNLDCQEEPDSCISEKLFEEMAEVMVTDGWKDAGYEYLCIDDCWMAPQRDSEGRLQADPQRFPHGIRQLANHVHSKGLKLGIYADVGNKTCAGFPGSFGYYDIDAQTFADWGVDLLKFDGCYCDSLENLADGYKHMSLALNKTGRPIVYSCEWPLYMWPFQKPNYTEIRQYCNHWRNFADIDDSWASIKSILDWTSRNQERIVDVAGPGGWNDPDMLVIGNFGLSWDQQVTQMALWAIMAGPLFMSNDLRAISPQAKALLQDKEVIAINQDPLGKQGYQLRYGDNFEVWERPLSGDAWAVAIINRQEIGGPRGYTIPVAKLGKGVACNPACFITQLLPVKRKLGFYEATSRLRSHINPTGTVLLQLENTMQTSLKDLL

SEQ ID NO: 1863 - DNA, 1194 bp, Artificial Sequence
  variant of human alpha-galactosidase A
ctggataatggattggctagaacacctcctatggggtggcttcactgggagaggttcatgtgcaacctggactgtcaggaagaaccagacagctgcatctccgagaagctctttgaggaaatggccgaacgaatggtgactgacggctggaaagatgcaggttacgagtatctgtgtattgacgattgctggatggccccacaacgggattctgagggaagacttcaggctgatccgcagcgcttccctcatggcataaggcagctggcaaaccacgtccacagtaaggggctcaaattgggaatctacgcggacgtgggcaataagacctgtgccggttttccgggatcattcgggtattatgacattgacgcccaaacgtttgctgattggggcgttgacctgctgaaattcgatggttgctactgtgacagcctcgaaaacctggcagacggctacaagcatatgtctctcgccctgaataaaaccggtcgggatatcgtatattcctgcgagtggcctctttacatgtggccatttcagaaaccgaactacacagaaattcgccagtattgcaatcattggaggaacttcgctgatatcgatgactcatgggcctccataaagagcatcttggactggaccagtcggaatcaggagcgaattgtggatgtcgcaggccctggaggatggaacgatccagacatgctggtgatcggcaattttggcctctcttgggaccagcaggttacccaaatggctctgtgggcaattatggccggccctcttttcatgagcaacgatctgcgcgcgatctcaccacaggcaaaggccctgctccaagacacggacgtgatagccatcaatcaggacccgttgggaaagcagggctaccagctgagaaaaggcgacaactttgaggtctgggaaaggcctttgagtggagatgcgtgggctgtggccattattaatcggcaagagatcggaggtccacgcggttatacaattcctgtagcaaagcttggcaagggcgttgcctgtaacccagcttgcttcatcactcagcttctgccggtgaagagaaaactgggtttctacgaagctaccagcaggctccgatcccacatcaaccctacaggaaccgtcctcttgcagctggagaatacgatgcagacttcactgaaggacctcctg

SEQ ID NO: 1864 - protein, 398 aa, Artificial Sequence
  variant of human alpha-galactosidase A
LDNGLARTPPMGWLHWERFMCNLDCQEEPDSCISEKLFEEMAERMVTDGWKDAGYEYLCIDDCWMAPQRDSEGRLQADPQRFPHGIRQLANHVHSKGLKLGIYADVGNKTCAGFPGSFGYYDIDAQTFADWGVDLLKFDGCYCDSLENLADGYKHMSLALNKTGRDIVYSCEWPLYMWPFQKPNYTEIRQYCNHWRNFADIDDSWASIKSILDWTSRNQERIVDVAGPGGWNDPDMLVIGNFGLSWDQQVTQMALWAIMAGPLFMSNDLRAISPQAKALLQDTDVIAINQDPLGKQGYQLRKGDNFEVWERPLSGDAWAVAIINRQEIGGPRGYTIPVAKLGKGVACNPACFITQLLPVKRKLGFYEATSRLRSHINPTGTVLLQLENTMQTSLKDLL

What is claimed is:

1. A recombinant alpha galactosidase A and/or biologically active recombinant alpha galactosidase A fragment comprising an amino acid sequence comprising at least 70%, at least 75%, at least 80%, at least 85%, at least 90%, at least 91%, at least 92%, at least 93%, at least 94%, at least 95%, at least 96%, at least 97%, at least 98%, or at least 99% sequence identity to SEQ ID NO: 374, 704, and/or 1022.

2. The recombinant alpha galactosidase A of claim 1, wherein said recombinant alpha galactosidase comprises a polypeptide sequence having at least 85%, 86%, 87%, 88%, 89%, 90%, 91%, 92%, 93%, 94%, 95%, 96%, 97%, 98%, 99%, or more sequence identity to SEQ ID NO: 8, or a functional fragment thereof, and wherein said recombinant alpha galactosidase A comprises at least one substitution or substitution set at one or more positions selected from 2, 4, 5, 24/59, 24/143/144, 24/143/202/333, 24/143/202/352/390/391, 24/143/333/352/387/390/391, 24/143/390/391, 24/202, 24/202/271, 24/202/333/352, 24/271/352, 24/352/387/390/391, 24/387/391, 31, 40, 59, 59/143, 59/143/202, 59/143/202/271/333, 59/143/271, 59/143/333, 59/202, 59/202/333, 59/271/387/390, 73, 76, 80, 83, 84, 91/215/361, 122, 123, 143, 143/202, 143/271, 143/271/352/390, 143/333, 143/333/387/390, 143/387/391, 147, 155, 164, 165, 179, 186, 202, 202/333, 210, 215/218, 218, 218/361, 218/361/398, 218/398, 246, 254/398, 271, 271/333, 271/333/390/391, 271/333/391, 271/352/391, 273, 275, 277, 278, 280, 281, 283, 284, 287, 300, 303, 304, 325, 331, 332, 333/352, 333/390/391, 333/391, 334, 335, 336, 338, 339, 340, 341, 343, 359, 360, 361, 362, 367, 369, 371, 373, 375, 377, 382, 382/398, 385, 387/391, 390, and 398, wherein the amino acid positions of said polypeptide sequence are numbered with reference to SEQ ID NO: 704.

3. The recombinant alpha galactosidase A of claim 1, wherein said recombinant alpha galactosidase comprises a polypeptide sequence having at least 85%, 86%, 87%, 88%, 89%, 90%, 91%, 92%, 93%, 94%, 95%, 96%, 97%, 98%, 99%, or more sequence identity to SEQ ID NO: 8, or a functional fragment thereof, and wherein said recombinant alpha galactosidase A comprises at least one substitution or substitution set at one or more positions selected from 10, 39, 44, 47, 92, 166, 206, 217, 247, 261, 271, 302, 316, 322, 337, 368, and 392, wherein the amino acid positions of said polypeptide sequence are numbered with reference to SEQ ID NO: 374.

4. The recombinant alpha galactosidase A of claim 1, wherein said recombinant alpha galactosidase comprises a polypeptide sequence having at least 85%, 86%, 87%, 88%, 89%, 90%, 91%, 92%, 93%, 94%, 95%, 96%, 97%, 98%, 99%, or more sequence identity to SEQ ID NO:58, or a functional fragment thereof, and wherein said recombinant alpha galactosidase A comprises at least one substitution or substitution set at one or more positions selected from 10, 10/392, 31, 31/39/44/166/302, 31/47, 31/283/284, 39, 39/44, 39/44/47, 39/44/47/261/283/284, 39/44/283, 39/44/339, 39/47/261, 39/92, 39/206, 39/284, 44, 44/284/302, 84, 84/92, 84/284/302/392, 84/316, 84/368/392, 92, 92/206/217, 92/206/275, 92/206/284, 92/206/302/368, 92/271, 92/271/277, 92/275/284, 92/283, 92/283/392, 92/284, 92/302, 92/316, 92/368, 155, 155/217, 155/368, 166, 166/283/284, 166/302, 206, 206/217, 206/334, 261, 261/283, 271, 271/368, 275, 283, 283/284, 283/392, 284, 302, 316, 334, 339, 368, 368/392, and 392, wherein the amino acid positions of said polypeptide sequence are numbered with reference to SEQ ID NO: 1022.

5. The recombinant alpha galactosidase A of claim 1, wherein said alpha galactosidase A comprises at least one mutation in at least one position as provided in Tables 11.1, 12.1, and/or 13.1.

6. The recombinant alpha galactosidase A of claim 1, wherein said recombinant alpha galactosidase A is derived from a human alpha galactosidase A.

7. A recombinant alpha galactosidase A comprising the polypeptide sequence of SEQ ID NO: 374, 704, and/or 1022.

8. The recombinant alpha galactosidase A of claim 1, wherein said recombinant alpha galactosidase A is more thermostable than the alpha galactosidase A of SEQ ID NO: 2, 374,704, and/or 1022.

9. The recombinant alpha galactosidase A of claim 1, wherein said recombinant alpha galactosidase A is more stable at pH 7 than the alpha galactosidase A of SEQ ID NO: 2, 374, 704, and/or 1022.

10. The recombinant alpha galactosidase A of claim 1, wherein said recombinant alpha galactosidase A is more stable at pH 4 than the alpha galactosidase A of SEQ ID NO: 2, 374, 704, and/or 1022.

11. The recombinant alpha galactosidase A of claim 1, wherein said recombinant alpha galactosidase A is more stable to exposure to serum than the alpha galactosidase A of SEQ ID NO: 2, 374, 704, and/or 1022.

12. The recombinant alpha galactosidase A of claim 1, wherein said recombinant alpha galactosidase A is more lysosomally stable than the alpha galactosidase A of SEQ ID NO: 2, 374, 704, and/or 1022.

13. The recombinant alpha galactosidase A of claim 1, wherein said recombinant alpha galactosidase A is more readily taken up by cells than the alpha galactosidase A of SEQ ID NO: 2, 374, 704, and/or 1022.

14. The recombinant alpha galactosidase A of claim 1, wherein said recombinant alpha galactosidase A depletes more globotriaosylceramide from cells than the alpha galactosidase A of SEQ ID NO: 2, 374, 704, and/or 1022.

15. The recombinant alpha galactosidase A of claim 1, wherein said recombinant alpha galactosidase A is purified.

16. The recombinant alpha galactosidase A of claim 1, wherein said recombinant alpha galactosidase A exhibits at least one improved property selected from: i) enhanced catalytic activity; ii) increased tolerance to pH 7; iii) increased tolerance to pH 4; iv) increased tolerance to serum; v) increased uptake into cells; vi) increased depletion of globotriaosylceramide from cells; vii) reduced immunogenicity; or a combination of any of i), ii), iii), iv), v), vi), and/or vii), as compared to a reference sequence.

17. The recombinant alpha galactosidase A of claim 16, wherein said reference sequence is selected from SEQ ID NO: 374, 704, and/or 1022.

18. A composition comprising at least one recombinant alpha galactosidase A of claim 1.

19. A recombinant polynucleotide sequence encoding at least one recombinant alpha galactosidase A set forth in claim 1.

20. The recombinant polynucleotide sequence of claim 19, wherein said polynucleotide sequence is selected from DNA, RNA, and mRNA.

21. The recombinant polynucleotide sequence of claim 20, wherein said polynucleotide sequence is codon-optimized.

22. An expression vector comprising the recombinant polynucleotide sequence of claim 19.

23. The expression vector of claim 22, wherein said recombinant polynucleotide sequence is operably linked to one or more control sequences.

24. The expression vector of claim 23, wherein said control sequence is a promoter.

25. The expression vector of claim 24, wherein said promoter is a heterologous promoter.

26. A host cell comprising the expression vector of claim 22.

27. The host cell of claim 26, wherein said host cell is selected from eukaryotes and prokaryotes.

28. The host cell of claim 26, wherein said host cell is a mammalian cell.

29. A method of producing an alpha galactosidase A variant, comprising culturing said host cell of claim 26, under conditions that said alpha galactosidase A encoded by said recombinant polynucleotide is produced.

30. The method of claim 29, further comprising the step of recovering said alpha galactosidase A.

31. The method of claim 30, further comprising the step of purifying said alpha galactosidase A.

32. A pharmaceutical composition for the treatment of Fabry disease, comprising the composition of claim 18.

33. The pharmaceutical composition of claim 32, further comprising a pharmaceutically acceptable carrier and/or excipient.

34. The pharmaceutical composition of claim 32, wherein said composition is suitable for parenteral injection or infusion to a human.

35. A pharmaceutical composition comprising the recombinant polynucleotide of claim 19.

36. A method for treating and/or preventing the symptoms of Fabry disease in a subject, comprising providing a subject having Fabry disease, and providing the pharmaceutical composition of claim 32, to said subject.

37. The method of claim 36, wherein said symptoms of Fabry disease are ameliorated.

38. The method of claim 36, wherein said subject is able to eat a diet that is less restricted in its fat content than diets required by subjects exhibiting the symptoms of Fabry disease.

39. The method of claim 36, wherein said subject is an infant or child.

40. The method of claim 36, wherein said subject is an adult or young adult.
